(19) United States
(12) Patent Application Publication
(10) Pub. No.: US 2026/0137736 A1
(43) Pub. Date: May 21, 2026

(54) PROBIOTIC LACTOBACILLUS STRAIN COMPOSITIONS AND APPLICATIONS THEREFOR INCLUDING FOR LEAKY GUT AND INFLAMMATION

(71) Applicant: BiomEdit, LLC, Fishers, IN (US)

(72) Inventors: Arvind Kumar, Fishers, IN (US); Dharanesh Mahimapura Gangaiah, Fishers, IN (US)

(21) Appl. No.: 18/704,175

(22) PCT Filed: Oct. 26, 2022
(86) PCT No.: PCT/US2022/047847

§ 371 Date: Apr. 24, 2024

Related U.S. Application Data
(60) Provisional application No. 63/272,100, filed on Oct. 26, 2021.

(51) Int. Cl. A61K 35/747; A61K 31/56; A61K 31/702; A61K 38/19; A61P 1/00; C12N 15/52

(52) U.S. Cl. CPC A61K 35/747; A61K 31/56; A61K 31/702; A61K 38/19; A61P 1/00; C12N 15/52; C12N 2800/101; C12N 2840/002

(57) ABSTRACT

The present invention provides probiotic compositions and methods for improving animal health. The probiotic compositions include one or more isolated strains of Lactobacillus reuteri which colonizes the gastrointestinal tract to increase the health of an animal, including to alleviate the effects of chronic alcohol consumption, leaky gut, increased intestinal permeability and inflammation and treat or prevent alcohol-associated intestinal dysbiosis, leaky gut, increased intestinal permeability and inflammation, including intestinal inflammation associated with inflammatory bowel disease.

### CROSS REFERENCE TO RELATED APPLICATIONS

[0001] The present application claims priority to U.S. Application Ser. No. 63/272,100, filed Oct. 26, 2021, the entire contents of which is incorporated by reference herein.

### SEQUENCE LISTING

[0002] This application contains a Sequence Listing, which was submitted in XML format via EFS-Web, and is hereby incorporated by reference in its entirety. The XML copy, created on Oct. 24, 2022, is named “2950-30PCT_ST26.xml” and is 5,069,323 bytes in size.

### FIELD OF THE INVENTION

[0003] The present invention relates to probiotic compositions and methods for improving animal health. The probiotic compositions include one or more isolated strains of Lactobacillus reuteri which colonizes the gastrointestinal tract to increase the health of an animal, including to alleviate the effects of chronic alcohol consumption, leaky gut, increased intestinal permeability and inflammation and treat or prevent alcohol-associated intestinal dysbiosis, leaky gut, increased intestinal permeability and inflammation.

### BACKGROUND

[0004] Direct fed microbials (DFMs), often also called probiotics, are microorganisms which colonize, at least temporarily, the gastrointestinal tract of an animal and provide some beneficial effect to that animal. The microorganisms can be bacterial species, for example those from the genera Bacillus, Lactobacillus, Lactococcus, and Enterococcus. The microorganisms can also be yeast or even molds. The microorganisms can be provided to an animal orally or mucosally or, in the case of birds, provided to a fertilized egg, i.e. in ovo.

[0005] The beneficial activity provided by a DFM or probiotics can be the synthesis of vitamins or other nutritional molecules needed for a healthy metabolism of the host animal. A DFM or probiotic can also protect the host animal from disease, disorders, or clinical symptoms caused by other, pathogenic microorganisms. For example, the DFM or probiotic may produce factors having inhibitory or cytotoxic activity against certain species of pathogens, such as deleterious or disease-causing bacteria, or immunomodulatory activity, such as modulating immune response or improving immune response to foreign agent(s) or foreign antigen. The DFM or probiotic may produce factors or biomolecules having therapeutic activity, including blocking or reducing inflammation or inflammatory response(s).

[0006] Alcohol use disorder (AUD) affects 15.1 million US adults and is associated with more severe medical illness (Fernandezsola J et al. (1995) Archives of Internal Medicine 155: 1649-1654; de Roux, A et al. (2006) Chest, 129:1219-1225). A high prevalence of pneumonia and other infections, with subsequent poor clinical outcomes, is found in alcohol drinkers, as both innate and adaptive immune cells are compromised by alcohol use (Gonzalez-Quintela A et al. (2008) Clinical and Experimental Immunology, 151:42-50; Greenberg, S S et al. (1999) Alcoholism, Clinical and Experimental Research, 23: 735-744; Mandrekar, P et al. (2004) The Journal of Immunology, 173: 3398-3407; Mason C M et al. (2004)) Infection and Immunity, 72:2556-2563; Samuelson, D R et al. (2017) PLoS Path, 13(6), e1006426). Alcohol consumption perturbs the normal intestinal microbial communities and induces gut dysbiosis. Binge-on-chronic alcohol feeding in animal models shifts gut microbiota diversity and functional capacity. Human and rodent studies have reported that excessive alcohol consumption changes gut microbiota composition, structure, and metabolic function (Leclercq S et al. (2014) Proceedings of the National Academy of Sciences of the United States of America, 111, E4485-E4493, 2014a; Mutlu, E A et al. (2012) American Journal of Physiology-Gastrointestinal and Liver Physiology, 302, G966-G978).

[0007] Recent studies have shown that alterations in the intestinal immune response as a consequence of alcohol-induced dysbiosis contribute to increased host susceptibility to Klebsiella pneumonia (Samuelson D. R. et al (2017) PLOS Pathogens 13(6): e1006426; doi.org/10.1371/journal.ppat.1006426). Alcohol-associated susceptibility to K. pneumoniae is, in part, mediated by gut dysbiosis, as alcohol-naïve animals recolonized with a microbiota isolated from alcohol-fed mice had an increased respiratory burden of K. pneumoniae compared to mice recolonized with a control microbiota. The increased susceptibility in alcohol dysbiosis recolonized animals was associated with an increase in pulmonary inflammatory

cytokines, and a decrease in the number of CD4+ and CD8+ T-cells in the lung following Klebsiella infection but an increase in T-cell counts in the intestinal tract following Klebsiella infection, suggesting intestinal T-cell sequestration as a factor in impaired lung host defense. Mice recolonized with an alcohol-dysbiotic microbiota also had increased intestinal damage as measured by increased levels of serum intestinal fatty acid binding protein.

[0008] Alcohol consumption also increases susceptibility to pneumococcal pneumonia, mediated by intestinal dysbiosis, including as demonstrated in a humanized murine HIV model (Samuelson D. R, et al (2019) Alcohol 80:33-43; doi.org/10.1016/j.alcohol.2018.08.012). The intestinal microbiota from alcohol-fed mice (regardless of HIV status) significantly impaired clearance of S. pneumoniae. The data indicate that alcohol feeding, as well as alcohol-associated intestinal dysbiosis, compromise pulmonary host defenses against infection, including infectious bacteria, such as pneumococcal pneumonia. The microbial community structure is altered and dysfunctional with significant alcohol consumption.

[0009] Intestines or guts are semi-permeable. The mucous lining of intestines is designed to absorb water and nutrients from food into the bloodstream. However, some animals or individuals have increased intestinal permeability or hyperpermeability, wherein their guts or intestines release more than water and nutrients through and can even permit other molecules or components to ‘leak’ through the intestines or gut. This can often be termed ‘leaky gut’. Leaky gut mechanism and clinical implications are reviewed in Camilleri, M (Camilleri M (2019) Gut 68(8):1516-1527; doi:10.1136/gutjnl-2019-318427).

[0010] As noted above, alcohol use can lead to increased intestinal permeability, intestinal dysbiosis, and leaky gut, in addition, studies have shown that people who have certain chronic gastrointestinal diseases have leaky guts that let larger molecules through, including potentially harmful or toxic ones. In as much as the intestinal lining importantly acts as a barrier to bacteria and other infectious agents inside the gut, this barrier is an important agent and component in the immune system. If the intestinal barrier is impaired, it can permit toxins and other harmful or inflammatory molecules to enter the bloodstream. These toxins may trigger an inflammatory response that may manifest as various diseases.

[0011] The most direct causes of altered or increased intestinal permeability include: chronic inflammatory states, such as IBD and celiac disease; other diseases that cause intestinal injury, such as HIV/AIDS; chemotherapy and radiation therapies that degrade the intestinal mucosa; chronic overuse of alcohol or NSAIDs, such as aspirin and ibuprofen; food allergies that cause an immune response to certain foods. Intestinal permeability is a recognized feature of several inflammatory and autoimmune diseases affecting the digestive system, including inflammatory bowel disease, Crohn's disease and celiac disease (Bjarnason I et al (1983) Lancet 1:323-5; Hollander D et al (1986) Ann Intern Med 1986; 105:883-5; Vazquez-Roque M I et al (2013) Gastroenterology 144:903-11, e3; D'Incà R et al (1999) Am J Gastroenterol 94:2956-60). These diseases cause chronic inflammation in the intestines, which leads to erosion of the intestinal barrier gradually over time. Higher levels of gut bacteria products have been measured in the blood in individuals with gastrointestinal (01) diseases that are known to cause intestinal permeability

[0012] There is a need in the art for approaches and therapies to mediate and alleviate the effects of chronic alcohol consumption, including intestinal dysbiosis, leaky gut, increased intestinal permeability and inflammation. There is a need for probiotic compositions to correct or address the altered and compromised intestinal microbial community with chronic alcohol consumption and intestinal diseases and inflammation and for methods that provide beneficial bacteria and/or molecules to the gastrointestinal tract of an animal and improve animal health, particularly in animals consuming alcohol on a chronic or binge basis, animals with leaky gut, increased intestinal permeability and intestinal-derived or intestinal-associated inflammation.

### SUMMARY OF THE INVENTION

[0013] The present invention provides compositions and methods for improving animal health. The probiotic compositions and methods improve the health of an animal, including in alleviating the effects of chronic alcohol consumption, leaky gut, increased intestinal permeability and inflammation and treat or prevent alcohol-associated intestinal dysbiosis, leaky gut, increased intestinal permeability and inflammation.

[0014] In one embodiment, the invention provides a composition having at least one isolated Lactobacillus reuteri strain, wherein said composition increases animal health when an effective amount is administered to an animal, as compared to an animal not administered the composition. In one embodiment, the invention provides a composition having at least one of an isolated first Lactobacillus reuteri strain and an isolated second Lactobacillus reuteri strain, wherein said composition increases animal health when an effective amount is administered to an animal, as compared to an animal not administered the composition.

[0015] In one embodiment, the invention provides a composition having at least one isolated Lactobacillus reuteri strain, wherein said composition increases animal health, including in alleviating the effects of chronic alcohol consumption, leaky gut, increased intestinal permeability and inflammation, when an effective amount is administered to an animal, as compared to an animal not administered the composition. In one embodiment, the invention provides a composition having at least one of an isolated first Lactobacillus reuteri strain and an isolated second Lactobacillus reuteri strain, wherein said composition increases animal health, including in alleviating the effects of chronic alcohol consumption, leaky gut, increased intestinal permeability and inflammation, when an effective amount is administered to an animal, as compared to an animal not administered the composition.

[0016] The invention provides methods for reducing intestinal permeability, alleviating alcohol induced or disease related leaky gut syndrome, alleviating the intestinal and systemic effects of chronic alcohol consumption, including intestinal dysbiosis, and reducing inflammation, including intestinal-derived or intestinal-associated inflammation, all and any of which include administration of an effective amount of an immunogenic probiotic composition comprising at least one Lactobacillus reuteri strain. In embodiments of the methods, a combination of two or at least two Lactobacillus reuteri strains are administered.

[0017] In one embodiment, the present disclosure provides a method of alleviating or modulating increased intestinal permeability or leaky gut in a subject. In one embodiment, the present disclosure provides a method of reducing intestinal permeability in a subject. The method includes administering an effective amount of a probiotic composition comprising at least one Lactobacillus reuteri strain. In an embodiment, the method includes administering an effective amount of an immunogenic probiotic composition comprising at least one Lactobacillus reuteri strain wherein the at least one Lactobacillus reuteri strain comprises at least one sequence selected from SEQ ID NO:1-55 and sequences having at least 98%, at least 98.5%, at least 99%, or at least 99.5% sequence identity with at least one of SEQ ID NO:1-55. In an embodiment, the method comprises administering an effective amount of a probiotic composition comprising at least one Lactobacillus reuteri strain, and optionally, an anti-inflammatory agent, molecule or cytokine, to a subject.

[0018] In one embodiment, the present disclosure provides a method of reducing inflammation, including intestinal-derived or intestinal-associated inflammation, including inflammation associated with intestinal disease or with increased intestinal permeability, in a subject. The method includes administering an effective amount of an immunogenic probiotic composition comprising at least one Lactobacillus reuteri strain and wherein the at least one Lactobacillus reuteri strain comprises at least one sequence selected from SEQ ID NO: 1-55 and sequences having at least 98%, at least 98.5%, at least 99%, or at least 99.5% sequence identity with at least one of SEQ ID NO:1-55. In an embodiment, the method comprises administering an effective amount of a probiotic composition comprising at least one Lactobacillus reuteri strain, and optionally, an anti-inflammatory agent, molecule or cytokine, to a subject. In an embodiment, the method comprises administering an effective amount of a probiotic composition comprising at least one Lactobacillus reuteri strain, and optionally, an immunomodulatory agent or molecule, to a subject.

[0019] In an embodiment of the method(s), a combination of two isolated Lactobacillus reuteri strains are administered. In embodiments, an anti-inflammatory agent, molecule or cytokine or an immunomodulatory agent is administered in combination with the at least one Lactobacillus reuteri strain or with the two isolated Lactobacillus reuteri strains. The at least one or the two Lactobacillus reuteri strains may be administered prior to one or more anti-inflammatory agent, molecule or cytokine or immunomodulator; may be administered prior to and in conjunction one or more anti-inflammatory agent, molecule or cytokine or immunomodulator; may be administered prior to, in conjunction with, and following one or more anti-inflammatory agent, molecule or cytokine or immunomodulator; or may be administered in combination with or shortly following one or more anti-inflammatory agent, molecule or cytokine or immunomodulator. The one or more anti-inflammatory agent, molecule or cytokine or immunomodulator may be administered as a single dose or multiple doses. The at least one or the two Lactobacillus reuteri strains may be administered prior to and/or between and/or in combination with a dose of one or more anti-inflammatory agent, molecule or cytokine or immunomodulator or multiple doses of one or more anti-inflammatory agent, molecule or cytokine or immunomodulator.

[0020] In an embodiment of the method(s) of the invention, a combination of two isolated Lactobacillus reuteri strains includes or comprises or is a combination of a first isolated Lactobacillus reuteri strain and a second isolated Lactobacillus reuteri strain. In one embodiment, the isolated first Lactobacillus reuteri strain includes at least one of: a nucleic acid sequence having at least 95%, at least 96%, at least 97%, at least 98%, or at least 99% sequence identity with SEQ ID NO:26, a nucleic acid sequence having at least 95%, at least 96%, at least 97%, at least 98%, or at least 99% sequence identity with SEQ ID NO: 1, a nucleic acid sequence having at least 95%, at least 96%, at least 97%, at least 98%, or at least 99% sequence identity with SEQ ID NO: 3, and a nucleic acid that encodes for an amino acid sequence having at least 95%, at least 96%, at least 97%, at least 98%, or at least 99% sequence identity with SEQ ID NO: 8.

[0021] In one embodiment, the second isolated second Lactobacillus reuteri strain includes at least one of: a nucleic acid sequence having at least 95%, at least 96%, at least 97%, at least 98%, or at least 99% sequence identity with SEQ ID NO:25, a nucleic acid sequence having at least 95%, at least 96%, at least 97%, at least 98%, or at least 99% sequence identity with SEQ ID NO: 27, a nucleic acid sequence having at least 95%, at least 96%, at least 97%, at least 98%, or at least 99% sequence identity with SEQ ID NO: 28, and a nucleic acid sequence having at least 95%, at least 96%, at least 97%, at least 98%, or at least 99% sequence identity with SEQ ID NO: 29.

[0022] In one embodiment, the isolated first Lactobacillus reuteri strain has a nucleic acid or amino acid sequence including at least one of SEQ ID NOs: 1-24, 26, and 49-55, sequences having at least one nucleic acid or amino acid sequence difference from the sequence of at least one of SEQ ID NOs: 1-24, 26, and 49-55, sequences having one or more nucleic acid or amino acid sequence difference from the sequence of at least one of SEQ ID NOs: 1-24, 26, and 49-55, sequences having at least one nucleic acid or amino acid sequence difference from the sequence of at least one of SEQ ID NOs: 1-24, 26, and 49-55 and further having at least 99% sequence identity with at least one of SEQ ID NOs: 1-24, 26, and 49-55, sequences having at least one nucleic acid or amino acid sequence difference from the sequence of at least one of SEQ ID NOs: 1-24, 26, and 49-55 and further having at least 99% sequence identity with one or more of SEQ ID NOs: 1-24, 26, and 49-55, sequences having at least 98%, at least 98.5%, at least 99%, or at least 99.5% sequence identity with at least one of SEQ ID NOs: 1-24, 26, and 49-55. In one embodiment, the isolated first Lactobacillus reuteri strain has a genomic nucleic acid sequence including at least one of SEQ ID NOs: 49-55, sequences having one or more nucleic acid sequence difference from the sequence of at least one of SEQ ID NOs: 49-55, sequences having at least one nucleic acid sequence difference from the sequence of at least one of SEQ ID NOs: 49-55 and further having at least 97%, at least 98%, at least 99% or at least 99.5% sequence identity with one or more of SEQ ID NOs: 49-55, sequences having at least 98%, at least 98.5%, at least 99%, or at least 99.5% sequence identity to SEQ ID NOs: 49-55.

[0023] In an embodiment, the isolated first Lactobacillus reuteri strain is Lactobacillus reuteri strain 3632, which corresponds to ATCC Patent Deposit Number PTA-126788.

[0024] In one embodiment, the isolated first Lactobacillus reuteri strain comprises or has a genomic nucleic acid sequence corresponding to the genomic nucleic acid sequence of ATCC strain PTA-126788, or a variant thereof comprising or having a nucleic acid sequence at least 98%, at least 98.5%, at least 99%, or at least 99.5% sequence identity to the genomic nucleic acid sequence of ATCC strain PTA-126788.

[0025] In some embodiments, the isolated second Lactobacillus reuteri strain has a nucleic acid sequence or amino acid sequence including at least one of SEQ ID NOs: 25, 27-43, and 44-48, sequences having at least 98%, at least 98.5%, at least 99%, or at least 99.5% sequence identity with at least one of SEQ ID NOs: 25, 27-43, and 44-48.

[0026] In one embodiment, the isolated second Lactobacillus reuteri has a nucleic acid or amino acid sequence including at least one of SEQ ID NOs: 25, 27-43, and 44-48, sequences having at least one nucleic acid or amino acid sequence difference from the sequence of at least one of SEQ ID NOs: 25, 27-43, and 44-48, sequences having one or more nucleic acid or amino acid sequence difference from the sequence of at least one of SEQ ID NOs: 25, 27-43, and 44-48, sequences having at least one nucleic acid or amino acid sequence difference from the sequence of at least one of SEQ ID NOs: 25, 27-43, and 44-48 and further having at least 99% sequence identity with at least one of SEQ ID NOs: 25, 27-43, and 44-48, sequences having at least one nucleic acid or amino acid sequence difference from the sequence of at least one of SEQ ID NOs: 25, 27-43, and 44-48 and further having at least 99% sequence identity with one or more of SEQ ID NOs: 25, 27-43, and 44-48, sequences having at least 98%, at least 98.5%, at least 99%, or at least 99.5% sequence identity with at least one of SEQ ID NOs: 25, 27-43, and 44-48. In one embodiment, the isolated second Lactobacillus reuteri strain has a genomic nucleic acid sequence including at least one of SEQ ID NOs: 44-48, sequences having one or more nucleic acid sequence difference from the sequence of at least one of SEQ ID NOs: 44-48, sequences having at least one nucleic acid sequence difference from the sequence of at least one of SEQ ID NOs: 44-48 and further having at least 97%, at least 98%, at least 99% or at least 99.5% sequence identity with one or more of SEQ ID NOs: 44-48, sequences having at least 98%, at least 98.5%, at least 99%, or at least 99.5% sequence identity to SEQ ID NOs: 44-48.

[0027] In an embodiment, the second Lactobacillus reuteri is Lactobacillus reuteri strain 3630, which corresponds to ATCC Patent Deposit Number PTA-126787.

[0028] In one embodiment, the isolated second Lactobacillus reuteri strain comprises or has a genomic nucleic acid sequence corresponding to the genomic nucleic acid sequence of ATCC strain PTA-126787, or a variant thereof comprising or having a nucleic acid sequence at least 98%, at least 98.5%, at least 99%, or at least 99.5% sequence identity to the genomic nucleic acid sequence of ATCC strain PTA-126787.

[0029] In one embodiment, the present disclosure provides a method of reducing intestinal permeability or alleviating leaky gut in a subject. The method includes administering an effective amount of a probiotic composition comprising at least one Lactobacillus reuteri strain and wherein the at least one Lactobacillus reuteri strain comprises at least one sequence selected from SEQ ID NO: 1-55 and sequences having at least 98%, at least 98.5%, at least 99%, or at least 99.5% sequence identity with at least one of SEQ ID NO:1-55 to a subject. The method includes administering an effective amount of a probiotic composition comprising two isolated Lactobacillus reuteri strains, a first Lactobacillus reuteri strain and a second Lactobacillus reuteri strain, wherein the first Lactobacillus reuteri strain comprises at least one sequence selected from SEQ ID NO: 1-24, 26, and 49-55 and sequences having at least 98%, at least 98.5%, at least 99%, or at least 99.5% sequence identity with at least one of SEQ ID NO: 1-24, 26, and 49-55, wherein the second Lactobacillus reuteri strain comprises at least one sequence selected from SEQ ID NO: 25, 27-43, and 44-48 and sequences having at least 98%, at least 98.5%, at least 99%, or at least 99.5% sequence identity with at least one of SEQ ID NO: 25, 27-43, and 44-48 to a subject.

[0030] In one embodiment, the present disclosure provides a method of reducing inflammation, including intestinal-derived or intestinal-associated inflammation, including inflammation associated with intestinal disease or with increased intestinal permeability, in a subject. The method includes administering an effective amount of a probiotic composition comprising at least one Lactobacillus reuteri strain and wherein the at least one Lactobacillus reuteri strain comprises at least one sequence selected from SEQ ID NO:1-55 and sequences having at least 98%, at least 98.5%, at least 99%, or at least 99.5% sequence identity with at least one of SEQ ID NO: 1-55 to a subject. The method includes administering an effective amount of a probiotic composition comprising two isolated Lactobacillus reuteri strains, a first Lactobacillus reuteri strain and a second Lactobacillus reuteri strain, wherein the first Lactobacillus reuteri strain comprises at least one sequence selected from SEQ ID NO: 1-24, 26, and 49-55 and sequences having at least 98%, at least 98.5%, at least 99%, or at least 99.5% sequence identity with at least one of SEQ ID NO: 1-24, 26, and 49-55, wherein the second Lactobacillus reuteri strain comprises at least one sequence selected from SEQ ID NO: 25, 27-43, and 44-48 and sequences having at least 98%, at least 98.5%, at least 99%, or at least 99.5% sequence identity with at least one of SEQ ID NO: 25, 27-43, and 44-48 to a subject. The method includes further administering one or more anti-inflammatory agent, molecule or cytokine or immunomodulatory to a subject. The method includes further administering, including in combination in the composition, one or more anti-inflammatory agent, molecule or cytokine or immunomodulatory to a subject.

[0031] In one embodiment, the present disclosure provides a method of reducing intestinal inflammation associated with gastrointestinal disease including or such as inflammatory bowel disease (IBD), Crohn's disease, or celiac disease in a subject. The method includes administering an effective amount of a probiotic composition comprising at least one Lactobacillus reuteri strain and wherein the at least one Lactobacillus reuteri strain comprises at least one sequence selected from SEQ ID NO:1-55 and sequences having at least 98%, at least 98.5%, at least 99%, or at least 99.5% sequence identity with at least one of SEQ ID NO: 1-55 to a subject. The method includes administering an effective amount of a probiotic composition comprising two isolated Lactobacillus reuteri strains, a first Lactobacillus reuteri strain and a second Lactobacillus reuteri strain, wherein the first Lactobacillus reuteri strain comprises at least one sequence selected from SEQ ID NO: 1-24, 26, and 49-55 and sequences having at least 98%, at least 98.5%, at least 99%, or at least 99.5% sequence identity with at least one of SEQ ID NO: 1-24, 26, and 49-55, wherein the second Lactobacillus reuteri strain comprises at least one sequence selected from SEQ ID NO: 25, 27-43, and 44-48 and sequences having at least 98%, at least 98.5%, at least 99%, or at least 99.5% sequence identity with at least one of SEQ ID NO: 25, 27-43, and 44-48 to a subject. The method includes further administering one or more anti-inflammatory agent, molecule or cytokine or immunomodulatory to a subject. The method includes further administering, including in combination in the composition, one or more anti-inflammatory agent, molecule or cytokine or immunomodulatory to a subject.

[0032] In one embodiment, the present disclosure provides a method of reducing inflammation in the gut or intestine in a subject. The method includes administering an effective amount of a probiotic composition comprising at least one Lactobacillus reuteri strain and wherein the at least one Lactobacillus reuteri strain comprises at least one sequence selected from SEQ ID NO: 1-55 and sequences having at least 98%, at least 98.5%, at least 99%, or at least 99.5% sequence identity with at least one of SEQ ID NO: 1-55 to a subject. The method includes administering an effective amount of a probiotic composition comprising two isolated Lactobacillus reuteri strains, a first Lactobacillus reuteri strain and a second Lactobacillus reuteri strain, wherein the first Lactobacillus reuteri strain comprises at least one sequence selected from SEQ ID NO: 1-24, 26, and 49-55 and sequences having at least 98%, at least 98.5%, at least 99%, or at least 99.5% sequence identity with at least one of SEQ ID NO: 1-24, 26, and 49-55, wherein the second Lactobacillus reuteri strain comprises at least one sequence selected from SEQ ID NO: 25, 27-43, and 44-48 and sequences having at least 98%, at least 98.5%, at least 99%, or at least 99.5% sequence identity with at least one of SEQ ID NO: 25, 27-43, and 44-48 to a subject. The method includes further administering one or more anti-inflammatory agent, molecule or cytokine or immunomodulatory to a subject. The method includes further administering, including in combination in the composition, one or more anti-inflammatory agent, molecule or cytokine or immunomodulatory to a subject.

[0033] In one embodiment, the present disclosure provides a method of alleviating the intestinal effects of chronic alcohol consumption, including intestinal dysbiosis, in a subject. The method includes administering an effective amount of a probiotic composition comprising at least one Lactobacillus reuteri strain and wherein the at least one Lactobacillus reuteri strain comprises at least one sequence selected from SEQ ID NO: 1-55 and sequences having at least 98%, at least 98.5%, at least 99%, or at least 99.5% sequence identity thereto to a subject. The method includes administering an effective amount of a probiotic composition comprising two isolated Lactobacillus reuteri strains, a first Lactobacillus reuteri strain and a second Lactobacillus reuteri strain, wherein the first Lactobacillus reuteri strain comprises at least one sequence selected from SEQ ID NO: 1-24, 26, and 49-55 and sequences having at least 98%, at least 98.5%, at least 99%, or at least 99.5% sequence identity with at least one of SEQ ID NO: 1-24, 26, and 49-55, wherein the second Lactobacillus reuteri strain comprises at least one sequence selected from SEQ ID NO: 25, 27-43, and 44-48 and sequences having at least 98%, at least 98.5%, at least 99%, or at least 99.5% sequence identity with at least one of SEQ ID NO: 25, 27-43, and 44-48 to a subject.

[0034] In one embodiment, the present disclosure provides a probiotic composition. The composition includes at least one Lactobacillus reuteri strain and wherein the at least one Lactobacillus reuteri strain comprises at least one sequence selected from SEQ ID NO: 1-55 and sequences having at least 98%, at least 98.5%, at least 99%, or at least 99.5% sequence identity with at least one of SEQ ID NO: 1-55, and a pharmaceutically acceptable carrier. The composition includes at least one Lactobacillus reuteri strain and wherein the at least one Lactobacillus reuteri strain comprises at least one sequence selected from SEQ ID NO:44-48 or SEQ ID NO:49-55 and sequences having at least 98%, at least 98.5%, at least 99%, or at least 99.5% sequence identity with at least one of SEQ ID NO:44-48 or SEQ ID NO:49-55, and a pharmaceutically acceptable carrier. In an embodiment, the immunogenic probiotic composition comprises two isolated Lactobacillus reuteri strains, a first Lactobacillus reuteri strain and a second Lactobacillus reuteri strain, wherein the first Lactobacillus reuteri strain comprises at least one sequence selected from SEQ ID NO: 1-24, 26, and 49-55 and sequences having at least 98%, at least 98.5%, at least 99%, or at least 99.5% sequence identity with at least one of SEQ ID NO: 1-24, 26, and 49-55, wherein the second Lactobacillus reuteri strain comprises at least one sequence selected from SEQ ID NO: 25, 27-43, and 44-48 and sequences having at least 98%, at least 98.5%, at least 99%, or at least 99.5% sequence identity with at least one of SEQ ID NO: 25, 27-43, and 44-48.

[0035] In one embodiment, the first isolated first Lactobacillus reuteri strain includes at least one of: a nucleic acid sequence having at least 97%, at least 98%, or at least 99% sequence identity with SEQ ID NO:26, a nucleic acid sequence having at least 97%, at least 98%, or at least 99% sequence identity with SEQ ID NO: 1, a nucleic acid sequence having at least 95%, at least 96%, at least 97%, at least 98%, or at least 99% sequence identity with SEQ ID NO: 3, and a nucleic acid that encodes for an amino acid sequence having at least 97%, at least 98%, or at least 99% sequence identity with SEQ ID NO: 8.

[0036] In one embodiment, the second isolated second Lactobacillus reuteri strain includes at least one of: a nucleic acid sequence having at least 97%, at least 98%, or at least 99% sequence identity with SEQ ID NO:25, a nucleic acid sequence having at least 97%, at least 98%, or at least 99% sequence identity with SEQ ID NO: 27, a nucleic acid sequence having at least 97%, at least 98%, or at least 99% sequence identity with SEQ ID NO: 28, and a nucleic acid sequence having at least 97%, at least 98%, or at least 99% sequence identity with SEQ ID NO: 29.

[0037] In an embodiment, biosynthetic gene cluster (BGC), particularly a polyketide synthase (PKS) BGC is provided. In an embodiment, biosynthetic gene cluster (BGC), particularly a polyketide synthase (PKS) BGC of Lactobacillus reuteri strain 3632 is provided. In one embodiment, the PKS BGC is capable of producing an AhR-activating metabolite.

[0038] In some embodiments, the PKS BGC comprises the nucleic acid set out in SEQ ID NO: 77 is provided. In an embodiment, the PKS BGC comprises nucleic acid encoding one or more polypeptide selected from SEQ ID NOs: 78-92. In an embodiment, the PKS BGC comprises nucleic acid encoding one or more polypeptide selected from SEQ ID NOs: 78-85 and 87-92. In an embodiment, the PKS BGC comprises nucleic acid encoding the polypeptides SEQ ID NOs: 78-85 and 87-92. In an embodiment, an Ahr-metabolite synthesizing cluster of genes encoding proteins SEQ ID NO: 78-92, or at least SEQ ID NO: 78-85 and SEQ ID NO: 86-92 is provided.

[0039] In other embodiments, a plasmid is provided herein comprising nucleic acid encoding one or more polypeptide selected from SEQ ID NOs: 78-92. In an embodiment, the plasmid comprises nucleic acid encoding one or more polypeptide selected from SEQ ID NOs: 78-85 and 87-92. In an embodiment, the plasmid comprises nucleic acid encoding the polypeptides SEQ ID NOs: 78-85 and 87-92. In an embodiment, a plasmid comprising an Ahr-metabolite synthesizing cluster of genes encoding proteins SEQ ID NO: 78-92, or at least SEQ ID NO: 78-85 and SEQ ID NO: 86-92 is provided.

[0040] In embodiments, a gene cluster encoding an Ahr-metabolite, or a plasmid comprising a gene cluster encoding an Ahr-metabolite are provided. The Ahr-metabolite is relevant for IL-22 production. The Ahr-metabolite is capable of increasing IL-22 levels in the intestine. The Ahr-metabolite is capable of ameliorating or reducing intestinal inflammation. The Ahr-metabolite is relevant for and capable of maintaining intestinal barrier integrity. The Ahr-metabolite is relevant for and capable of reducing or alleviating increased intestinal permeability. In embodiments, increased expression or production of the PKS gene cluster, or increasing proteins SEQ ID NO:78-92, or SEQ ID NO:78-85 and 87-92 is contemplated herein. In embodiments, constitutive or inducible expression or production of the PKS gene cluster, or constitutive or inducible expression or production of proteins SEQ ID NO:78-92, or SEQ ID NO:78-85 and 87-92 is contemplated herein.

[0041] Other objects and advantages will become apparent to those skilled in the art from a review of the ensuing detailed description, which proceeds with reference to the following illustrative drawings, embodiments, and the attendant claims.

### DESCRIPTION OF THE DRAWINGS

[0042] FIG. 1 provides identification of L. reuteri strains by 16S rRNA amplicon sequencing. L. reuteri strains were identified by amplifying and sequencing of the 16S rRNA variable region. Phylogenetic analysis of the 16S rRNA sequences along with other L. reuteri sequences is depicted. Streptococcus pyogenes was included as an outgroup.

[0043] FIG. 2 depicts growth profiles of L. reuteri strains in MRS broth. Growth profiles were assessed by growing the strains in MRS broth and determining the CFU counts at different time points. The data shown is representative of 3 independent experiments.

[0044] FIG. 3 depicts phylogenetic relationship of L. reuteri strains PTA-126788 and PTA-126787 to other known human L. reuteri strains using 92 core genes. The phylogenetic relationship was explored using UBCG v3.0 and a maximum likelihood tree was inferred using GTR+CAT model. Streptococcus thermophilus and Enterococcus faecalis were used as outgroups.

[0045] FIG. 4 depicts quantification of production of D- and L-lactic acid by L. reuteri strains. L- and D-lactic acids were quantified using D-/L-lactic acid (D-L-lactate) Rapid Assay Kit (Megazyme). The data represent the mean±SD from 3 independent experiments.

[0046] FIG. 5 depicts ability of L. reuteri strains to undergo autoaggregation. A. Ability to undergo autoaggregation was determined by growing the strains overnight in MRS broth and observing for aggregate formation. B. Autoaggregation was quantified by measuring the OD600 in PBS after incubation for 5 hours and calculating the autoaggregation % as described in the methods section. The data represents the mean±SE of 3 independent experiments.

[0047] FIG. 6 depicts ability of L. reuteri strains to produce hydrogen peroxide. Hydrogen peroxide production was assessed by growing the strains on MRS agar supplemented with 0.25 mg/ml of tetramethylbenzidine and 0.01 mg/ml of horseradish peroxidase and observing for color change. Dark blue coloration indicates high production of hydrogen peroxide. The data are representative of 3 independent experiments.

[0048] FIG. 7 depicts tolerance of L. reuteri strains to 0.3% bile. The ability of L. reuteri strains to tolerate bile salts was assessed by growing the strains in the presence of 0.3% bile salts for 4 hours and determining the CFU counts at 0 hours and 4 hours after incubation with bile salts. The data represent the mean±SD from 3 independent experiments.

[0049] FIG. 8 shows tolerance of L. reuteri strains to acidic pH. The ability of L. reuteri strains to tolerate acidic pH was assessed by growing the strains at pH 2.5 for 3 hours and determining the CFU counts at 0 hours and 3 hours after incubation. The data represent the mean±SD from 3 independent experiments.

[0050] FIGS. 9A and 9B provides genome mapping of the (A) L. reuteri strain PTA-126787 and (B) L. reuteri strain PTA-126788 showing regions and positions occupied by different types of prophages as predicted by PhiSpy. The inner circle in each shows the locations of the genome contigs. The prophage locations on the genome are indicated and depicted in the outer circle. Six prophage regions in strain PTA-126787 and eight regions in PTA-126788 were identified and are indicated.

[0051] FIG. 10 depicts the protocol for the binge on chronic alcohol murine model utilized in these studies.

[0052] FIG. 11 provides the effect of various treatments/feed conditions on gut leak in the binge on chronic alcohol murine model. Animals were fed PF: Pair-fed, AF: Alcohol-fed, AFEP: alcohol-fed+ probiotic combination of L. reuteri strains 3630 and 3632, AFBB: Alcohol-fed+ Blueberry and AFBC: Alcohol-fed+ Broccoli. L. reuteri was administered for 10 days. Mice were acclimated in Lieber-DeCarli liquid control diet and randomized into alcohol fed (AF; Lieber-deCarli ethanol (EtOH) liquid diet) and pair-fed (PF) groups (control diet). AF mice were fed with EtOH liquid diet (5.0%, vol/vol) for 10 days and received 4 g/kg body weight EtOH by gavage at day 5 and day 10. AFEP group was fed with 3×10⁹ CFUs/mice/day of L. reuteri 3630 and 3632 (1:1) ratio for 10 days. FITC-dextran was gavaged and fluorescence measured in the serum to determine gut leak. FITC-dextran was gavaged then fluorescence measured in the serum.

[0053] FIGS. 12 A and B depicts the effect of L. reuteri administration for 10 days on the expression of the cytokines (A) IL-6 and (B) TNF-α in fold change in the intestine. PF, pair fed; AF, alcohol fed; AFP, alcohol fed+ compound X; AFPE, alcohol fed+ probiotic combination of L. reuteri strains 3630 and 3632; AFBB, Alcohol-fed+ Blueberry; AFBC, Alcohol-fed+ Broccoli.

[0054] FIGS. 13 A and B depicts the effect of L. reuteri administration for 10 days on the expression of the cytokines (A) IL-22 and (B) IL-10 in fold change in the intestine. PF, pair fed; AF, alcohol fed; AFP, alcohol fed+ compound X; AFPE, alcohol fed+ probiotic combination of L. reuteri strains 3630 and 3632; AFBB, Alcohol-fed+ Blueberry; AFBC, Alcohol-fed+ Broccoli.

[0055] FIGS. 14 A and B depicts the effect of L. reuteri administration for 10 days on the expression of the cytokines (A) IFN-γ and (B) IL-1β in fold change in the intestine. PF, pair fed; AF, alcohol fed; AFP, alcohol fed+ compound X; AFPE, alcohol fed+ probiotic combination of L. reuteri strains 3630 and 3632; AFBB, Alcohol-fed+ Blueberry; AFBC, Alcohol-fed+ Broccoli.

[0056] FIG. 15 depicts the AHR signaling pathway. The inactive form of AHR is localized in the cytosol in a complex composed of HSP90, AIP, p23, and c-SRC. AHR agonists induce conformational changes in AHR that result in its translocation to the nucleus. In the nucleus, AHR interacts with ARNT, and the heterodimer is responsible for the transcription of XRE-containing genes. Notes: (AHR) aryl hydrocarbon receptor, (N) N terminal motif, (C) C terminal motif, (NLS) nuclear localization signal, (bHLH) basic-helix loop helix, (PAS) Per-Arnt-Sim, (Q-rich) glutamine rich, (HSP90) heat shock protein 90, (AIP) AHR-interacting protein, (XRE) xenobiotic responsive elements, (AHRR) AHR repressor, (CYP) cytochrome P450, (IDO) indoleamine 2,3-dioxygenase

[0057] FIG. 16 depicts AhR metabolite gene clusters. A comparison of maps of the gene clusters relating to AhR metabolite production and synthesis from several L. reuteri strains is provided. The gene cluster from L. reuteri strain 3632 (LR3632) is compared to each of L. reuteri strains 2010 and R21c.

[0058] FIG. 17 provides in vitro data from HepG2-Lucia cells demonstrating dose-dependent AHR activation by fractions from L. reuteri strain 3632 (LR3632) extract enriched for pks metabolite and depicts AhR activator activity of control FICZ versus L. reuteri 3632 pks metabolite (2.5 mg/ml).

[0059] FIG. 18 shows AHR activation studies. AHR activator activity was assessed in L. reuteri 3632 supernatant, cell pellet resuspended, and medium. Significant AhR activator activity was identified in the L. reuteri 3632 pellet resuspended. The medium and supernatant had limited to no significant activity.

[0060] FIG. 19 provides AhR activation studies and assessment of AhR activator activity. The cell pellet was resuspended in the same volume as the culture supernatant and a direct comparison of ligand presence in the supernatant versus the pellet resusupended was conducted. Again, the activity is demonstrated in the pellet resuspended with little activity in the L. reuteri strain 3632 0.2 μM filtered supernatant.

### DETAILED DESCRIPTION

[0061] The present disclosure provides probiotic compositions and methods of use in improving animal health. In embodiments, methods and uses are provided for reducing intestinal permeability, addressing leaky gut syndrome or symptoms thereof, and for reducing or blocking inflammation, including inflammation and inflammatory responses or symptoms, including those associated with altered intestinal permeability, leaky gut, or leaky gut syndrome. The probiotic strains and probiotic compositions, particularly Lactobacillus reuteri strains and compositions thereof, are useful for and have application and activity in methods provided for reducing intestinal permeability, addressing leaky gut syndrome or symptoms thereof, and for reducing or blocking inflammation, including inflammation and inflammatory responses or symptoms, including those associated with altered intestinal permeability, leaky gut, or leaky gut syndrome.

[0062] In one embodiment, the invention provides a probiotic composition including at least one isolated Lactobacillus reuteri strain. The at least one Lactobacillus reuteri strain includes at least one of a isolated first Lactobacillus reuteri strain and a isolated second Lactobacillus reuteri strain.

[0063] The at least one isolated Lactobacillus reuteri strain may include one Lactobacillus reuteri strain or a combination of two or more Lactobacillus reuteri strains. The Lactobacillus reuteri strains may have been selected for gut adaptation in animals, such as poultry. The Lactobacillus reuteri strains may be been isolated from poultry.

[0064] In one embodiment, the isolated first Lactobacillus reuteri has a nucleic acid or amino acid sequence including at least one of SEQ ID NOs: 1-24, 26, and 49-55, sequences having at least 98%, at least 98.5%, at least 99%, or at least 99.5% sequence identity with at least one of SEQ ID NOs: 1-24, 26, and 49-55. In one embodiment, the isolated first Lactobacillus reuteri has a nucleic acid genome sequence including at least one of SEQ ID NOs: 49-55, sequences having at least 98%, at least 98.5%, at least 99%, or at least 99.5% sequence identity with at least one of SEQ ID NOs: 49-55. In one embodiment, the isolated first Lactobacillus reuteri strain has a nucleic acid genome sequence comprising SEQ ID NOs: 49-55, or a sequence having at least 98%, at least 98.5%, at least 99%, or at least 99.5% sequence identity with SEQ ID NOs: 49-55.

[0065] In one embodiment, the isolated first Lactobacillus reuteri has a nucleic acid or amino acid sequence including at least one of SEQ ID NOs: 1-24, 26, and 49-55, sequences having at least one nucleic acid or amino acid sequence difference from the sequence of at least one of SEQ ID NOs: 1-24, 26, and 49-55, sequences having one or more nucleic acid or amino acid sequence difference from the sequence of at least one of SEQ ID NOs: 1-24, 26, and 49-55, sequences having at least one nucleic acid or amino acid sequence difference from the sequence of at least one of SEQ ID NOs: 1-24, 26, and 49-55 and further having at least 99% sequence identity with at least one of SEQ ID NOs: 1-24, 26, and 49-55, sequences having at least one nucleic acid or amino acid sequence difference from the sequence of at least one of SEQ ID NOs: 1-24, 26, and 49-55 and further having at least 99% sequence identity with one or more of SEQ ID NOs: 1-24, 26, and 49-55, sequences having at least 98%, at least 98.5%, at least 99%, or at least 99.5% sequence identity with at least one of SEQ ID NOs: 1-24, 26, and 49-55.

[0066] In a preferred embodiment, the isolated first Lactobacillus reuteri strain is Lactobacillus reuteri strain 3632. As used herein, “Lactobacillus reuteri strain 3632”, “LR 3632”, and “3632” “ATCC Patent Deposit Number PTA-126788”, “strain PTA-126788”, V and “PTA-126788” may be used interchangeably.

[0067] In some embodiments, the isolated second Lactobacillus reuteri strain has a nucleic acid sequence or amino acid sequence including at least one of SEQ ID NOs: 25, 27-43, and 44-48, sequences having at least 98%, at least 98.5%, at least 99%, or at least 99.5% sequence identity with at least one of SEQ ID NOs: 25, 27-43, and 44-48. In embodiments, the isolated second Lactobacillus reuteri strain has a nucleic acid genome sequence comprising SEQ ID NOs: 44-48, or a sequence having at least 98%, at least 98.5%, at least 99%, or at least 99.5% sequence identity with SEQ ID NOs: 44-48.

[0068] In one embodiment, the isolated second Lactobacillus reuteri has a nucleic acid or amino acid sequence including at least one of SEQ ID NOs: 25, 27-43, and 44-48, sequences having at least one nucleic acid or amino acid sequence difference from the sequence of at least one of SEQ ID NOs: 25, 27-43, and 44-48, sequences having one or more nucleic acid or amino acid sequence difference from the sequence of at least one of SEQ ID NOs: 25, 27-43, and 44-48, sequences having at least one nucleic acid or amino acid sequence difference from the sequence of at least one of SEQ ID NOs: 25, 27-43, and 44-48 and further having at least 99% sequence identity with at least one of SEQ ID NOs: 25, 27-43, and 44-48, sequences having at least one nucleic acid or amino acid sequence difference from the sequence of at least one of SEQ ID NOs: 25, 27-43, and 44-48 and further having at least 99% sequence identity with one or more of SEQ ID NOs: 25, 27-43, and 44-48, sequences having at least 98%, at least 98.5%, at least 99%, or at least 99.5% sequence identity with at least one of SEQ ID NOs: 25, 27-43, and 44-48.

[0069] In a preferred embodiment, the second Lactobacillus reuteri is Lactobacillus reuteri strain 3630. As used herein, “Lactobacillus reuteri strain 3630”, “LR 3630”, “3630”, “ATCC Patent Deposit Number PTA-126787”, “strain PTA-126787” and “PTA-126787” may be used interchangeably.

[0070] In a preferred embodiment, the at least one isolated Lactobacillus reuteri strain includes strain 3632 and 3630. In another preferred embodiment, the at least one isolated Lactobacillus reuteri strain is L. reuteri strain 3632, or a strain having a nucleic acid genome sequence including at least one of SEQ ID NOs: 49-55, or a strain having a nucleic acid genome sequence having at least 98%, at least 98.5%, at least 99%, or at least 99.5% sequence identity with at least one of SEQ ID NOs: 49-55. In a preferred embodiment, the at least one isolated Lactobacillus reuteri strain is L. reuteri strain 3632. In another preferred embodiment, the at least one isolated Lactobacillus reuteri strain is L. reuteri strain 3630, or a strain having a nucleic acid genome sequence including at least one of SEQ ID NOs: 44-48, or a strain having a nucleic acid genome sequence having at least 98%, at least 98.5%, at least 99%, or at least 99.5% sequence identity with at least one of SEQ ID NOs: 44-48. In a preferred embodiment, the at least one isolated Lactobacillus reuteri strain is L. reuteri strain 3630.

[0071] In an embodiment, the at least one isolated Lactobacillus reuteri strain is a combination of Lactobacillus reuteri strain 3632 and strain 3630. In an embodiment, a combination of two or more Lactobacillus reuteri strains is a combination of strain 3632 and strain 3630. In an embodiment, a combination of two or more Lactobacillus reuteri strains is a combination of strain PTA-126788 and PTA-126787.

[0072] In an embodiment, the isolated strains of the present disclosure are not genetically modified by recombinant or genetically engineered means. In an embodiment, the strains of use and application in accordance with the disclosure are genetically modified by recombinant or genetically engineered means. In an embodiment, the isolated strains of the present disclosure are genetically modified by recombinant or genetically engineered means, such as to delete or inactivate the tetW gene or prevent tetW protein production. Deletion or inactivation may include modifications wherein the strain(s) are not genetically modified, such as for example wherein one or more of the strains are cultured for selection and isolation of a variant or mutant wherein expression or activity of tetW is altered, reduced or terminated or absent. Such a variant or mutant wherein expression or activity of tetW is altered, reduced or terminated or absent is altered but has not been genetically modified by recombinant or genetically engineered means.

[0073] In a preferred embodiment, the at least one isolated Lactobacillus reuteri strain is selected from strain 3632 and 3630. In a preferred embodiment, the composition, particularly a probiotic composition, comprises a combination of isolated Lactobacillus reuteri strains 3632 and 3630. In a preferred embodiment, the composition, particularly an immunogenic probiotic composition, comprises a combination of isolated Lactobacillus strains PTA-126788 and PTA-126787. In a preferred embodiment, the composition, particularly a probiotic composition, comprises a combination of isolated Lactobacillus strains PTA-126788 and PTA-126787 or a Lactobacillus strain having at least 98% or 99% amino acid or nucleic acid identity to strain PTA-126788 and isolated Lactobacillus strain PTA-126788 and PTA-126787 or a Lactobacillus strain having at least 99% amino acid or nucleic acid identity to strain PTA-126787. In a preferred embodiment, the composition, particularly a probiotic composition, comprises a combination of isolated Lactobacillus strains PTA-126788 and PTA-126787 or a Lactobacillus strain having at least 98% or at least 99% amino acid or nucleic acid identity to strain PTA-126788 and isolated Lactobacillus strains PTA-126788 and PTA-126787 or a Lactobacillus strain having at least 98% or at least 99% amino acid or nucleic acid identity to strain PTA-126787, wherein the strains each and/or together have probiotic activity or capability. In a preferred embodiment, the composition, particularly a probiotic composition, comprises a combination of isolated Lactobacillus strains PTA-126788 and PTA-126787 or a Lactobacillus strain having at least 98% or at least 99% amino acid or nucleic acid identity to strain PTA-126788 and isolated Lactobacillus strains PTA-126788 and PTA-126787 or a Lactobacillus strain having at least 98% or at least 99% amino acid or nucleic acid identity to strain PTA-126787, wherein the strains each and/or together have probiotic activity or capability and capability and activity to improve animal health.

[0074] In a preferred embodiment, the at least one isolated Lactobacillus reuteri strain includes strain 3632 and 3630. In a preferred embodiment, the at least one isolated Lactobacillus reuteri strain is selected from strain 3632 and 3630. In a preferred embodiment, the composition, particularly a probiotic composition, comprises a combination of isolated Lactobacillus reuteri strains 3632 and 3630. In a preferred embodiment, the composition, particularly a probiotic composition, comprises a combination of isolated Lactobacillus strains PTA-126788 and PTA-126787. In a preferred embodiment, the composition, particularly a probiotic composition, comprises a combination of isolated Lactobacillus strains PTA-126788 and PTA-126787 or a Lactobacillus strain having at least 99% amino acid or nucleic acid identity to strain PTA-126788 and isolated Lactobacillus strain PTA-126788 and PTA-126787 or a Lactobacillus strain having at least 99% amino acid or nucleic acid identity to strain PTA-126787. In a preferred embodiment, the composition, particularly a probiotic composition, comprises a combination of isolated Lactobacillus strains PTA-126788 and PTA-126787 or a Lactobacillus strain having at least 99% amino acid or nucleic acid identity to strain PTA-126788 and isolated Lactobacillus strains PTA-126788 and PTA-126787 or a Lactobacillus strain having at least 99% amino acid or nucleic acid identity to strain PTA-126787, wherein the strains each and/or together have probiotic activity or capability. In a preferred embodiment, the composition, particularly a probiotic composition, comprises a combination of isolated Lactobacillus strains PTA-126788 and PTA-126787 or a Lactobacillus strain having at least 99% amino acid or nucleic acid identity to strain PTA-126788 and isolated Lactobacillus strains PTA-126788 and PTA-126787 or a Lactobacillus strain having at least 99% amino acid or nucleic acid identity to strain PTA-126787, wherein the strains each and/or together have probiotic activity or capability and capability and activity to improve animal health.

[0075] In an embodiment, the strains each and/or together have activity or capability for reducing intestinal permeability, addressing leaky gut syndrome or symptoms thereof, and for reducing or blocking inflammation, including inflammation and inflammatory responses or symptoms, including those associated with altered intestinal permeability, leaky gut, or leaky gut syndrome in an animal.

[0076] In some embodiments, compositions disclosed herein include an isolated first Lactobacillus reuteri strain and an isolated second Lactobacillus reuteri strain at a ratio of approximately 0.75-1.5:1. In a preferred embodiment, the composition includes about equal amounts of the isolated first Lactobacillus reuteri strain and the isolated second Lactobacillus reuteri strain, or approximately 1:1. In an embodiment, the composition includes about equal amounts, such as equal amounts measured as CFU/kg or CFU/ml of the composition, of the isolated first Lactobacillus reuteri strain and the isolated second Lactobacillus reuteri strain, or approximately 1:1.

[0077] The compositions disclosed herein can be formulated as animal feed, feed additive, food ingredient, food additive, medicament additive or ingredient, water additive, water-mixed additive, consumable solution, consumable spray additive, consumable solid, consumable gel, injection, or combinations thereof. In one embodiment, the composition includes water.

[0078] In some embodiments, the compositions disclosed include the isolated first Lactobacillus reuteri strain in an amount of about 10²-10⁸ CFU/kg of the composition, about 10⁶-10⁸ CFU/kg of the composition, about 10⁴-10⁷ CFU/kg of the composition, about 10³-10⁵ CFU/kg of the composition, about 10² CFU/kg of the composition, about 10³ CFU/kg of the composition, about 10⁶ CFU/kg of the composition, about 10 CFU/kg of the composition, or about 10⁸ CFU/kg of the composition. In some embodiments, the compositions disclosed herein includes the isolated first Lactobacillus reuteri strain in an amount of about 10²-10⁸ CFU/ml of the composition, about 10⁶-10⁸ CFU/ml of the composition, about 10⁴-10⁷ CFU/ml of the composition, about 10³-10⁵ CFU/ml of the composition, about 10³ CFU/ml of the composition, about 10⁴ CFU/ml of the composition, about 10⁵ CFU/ml of the composition, about 10⁶ CFU/ml of the composition, about 10 CFU/ml of the composition, or about 10⁸ CFU/ml of the composition.

[0079] In some embodiments, the compositions disclosed herein includes the isolated second Lactobacillus reuteri strain in an amount of about 10²-10⁸ CFU/kg of the composition, about 10⁶-10⁸ CFU/kg of the composition, about 10⁴-10 CFU/kg of the composition, about 10³-10⁵ CFU/kg of the composition, about 10² CFU/kg of the composition, about 10³ CFU/kg of the composition, about 10⁶ CFU/kg of the composition, about 10 CFU/kg of the composition, or about 10⁸ CFU/kg of the composition. In some embodiments, the compositions disclosed herein includes the isolated second Lactobacillus reuteri strain in an amount of about 10²-10⁸ CFU/ml of the composition, about 10⁶-10⁸ CFU/ml of the composition, about 10⁴-10 CFU/ml of the composition, about 10³-10⁵ CFU/ml of the composition, about 10³ CFU/ml of the composition, about 10⁴ CFU/ml of the composition, about 10⁵ CFU/ml of the composition, about 10⁶ CFU/ml of the composition, about 10 CFU/ml of the composition, or about 10⁸ CFU/ml of the composition.

[0080] The present disclosure also provides methods of increasing animal health, wherein the method includes administering an effective amount of the composition to an animal. In accordance with the invention, methods are provided for reducing intestinal permeability, addressing leaky gut syndrome or symptoms thereof, and for reducing or blocking inflammation, including inflammation and inflammatory responses or symptoms, including those associated with altered intestinal permeability, leaky gut, or leaky gut syndrome.

[0081] In an embodiment, the Lactobacillus strains, particularly strain PTA-126787 and strain PTA-126788, provide an enzymatic profile as follows:

| | | PTA- | PTA- |
|---|---|---|---|
| Enzyme assayed | Substrate | 126787 | 126788 |
| Alkaline phosphatase | 2-naphthyl phosphate | − | − |
| Esterase (C 4) | 2-naphthyl butyrate | + | + |
| Esterase Lipase (C 8) | 2-naphthyl capylate | +/− | +/− |
| Lipase (C 14) | 2-naphthyl myristate | − | − |
| Leucine arylamidase | L-leucyl-2-naphthylamide | +++ | +++ |
| Valine arylamidase | L-valyl-2-naphthylamide | ++ | ++ |
| Cystine arylamidase | L-cystyl-2-naphthylamide | + | + |
| Trypsin | N-benzoyl-DL-argine-2- | − | − |
| | naphthylamide | | |
| α-chymotrypsin | N-glutaryl-phenylalanine-2- | − | − |
| | naphthylamide | | |
| Acid phosphatase | 2-naphthyl phosphate | +++ | +++ |
| Naphthol-AS BI- | Naphthol-AS-BI-phosphate | + | + |
| phosphohydrolase α- | 6-Br-2-naphthyl-αD- | +++ | +++ |
| galactosidase | galactopyranoside | | |
| β-galactosidase | 2-naphthyl-βD- | +++ | +++ |
| | galactopyranoside | | |
| β-glucuronidase | Naphthol-AS-BI-βD- | + | + |
| | glucuronide | | |
| α-glucosidase | 2-naphthyl-αD- | + | + |
| | glucopyranoside | | |
| β-glucosidase | 6-Br-2-naphthyl-βD- | − | − |
| | glucopyranoside | | |
| N-acetyl-β- | 1-naphthyl-N-acetyl-βD- | +/− | +/− |
| | glucosaminide | | |
| glucosaminidase α- | 6-Br-2-naphthyl-αD- | − | − |
| mannosidase | mannopyranoside | | |
| α-fucosidase | 2-naphthyl-αL- | − | − |
| | fucopyranoside | | |

+, positive enzymatic reaction;
−, negative enzymatic reaction

[0082] In an embodiment, the Lactobacillus strains, particularly strain PTA-126787 and strain PTA 126788, provide the following enzymes, particularly providing the enzymes in a significant amount:

| Enzyme assayed | Substrate |
|---|---|
| Esterase (C 4) | 2-naphthyl butyrate |
| Leucine arylamidase | L-leucyl-2-naphthylamide |
| Valine arylamidase | L-valyl-2-naphthylamide |
| Cystine arylamidase | L-cystyl-2-naphthylamide |
| Acid phosphatase | 2-naphthyl phosphate |
| Naphthol-AS BI- | Naphthol-AS-BI-phosphate |
| phosphohydrolase | |
| α-galactosidase | 6-Br-2-naphthyl-αD-galactopyranoside |
| β-galactosidase | 2-naphthyl-βD-galactopyranoside |
| β-glucuronidase | Naphthol-AS-BI-βD-glucuronide |
| α-glucosidase | 2-naphthyl-αD-glucopyranoside |

[0083] The present disclosure also provides methods of increasing animal health, wherein the method includes administering an effective amount of the composition to an animal. Methods are provided for reducing intestinal permeability, addressing leaky gut syndrome or symptoms thereof, and for reducing or blocking inflammation, including inflammation and inflammatory responses or symptoms, including those associated with altered intestinal permeability, leaky gut, or leaky gut syndrome

[0084] The composition disclosed herein and above increases animal health by providing positive health benefits when administered to an animal, as compared to an animal that has not been administered the composition. As used herein, “animal” includes bird, a human, or a non-human mammal. Specific examples of birds include poultry such as chickens or turkey. Specific examples of animal include chickens, turkey, dogs, cats, cattle and swine. The chicken may be a broiler chicken or egg-laying or egg-producing chicken. The animal may be a human. The animal may be a non-human mammal.

[0085] Positive health benefits include decreasing feed conversion ratio, increasing weight, increasing lean body mass, decreasing pathogen-associated lesion formation in the gastrointestinal tract, decreasing colonization of pathogens, reducing inflammation, and decreasing mortality rate. Positive health benefits described, demonstrated and provided herein include reducing intestinal permeability, addressing leaky gut syndrome or symptoms thereof, and for reducing or blocking inflammation, including inflammation and inflammatory responses or symptoms, including those associated with altered intestinal permeability, leaky gut, or leaky gut syndrome.

[0086] Altered or compromised intestinal permeability and intestinal dysbiosis are important and relevant to various clinical conditions and symptoms and problems. The most direct causes of altered or increased intestinal permeability include: chronic inflammatory states, such as IBD and celiac disease; other diseases that cause intestinal injury, such as HIV/AIDS; chemotherapy and radiation therapies that degrade the intestinal mucosa; chronic overuse of alcohol or NSAIDs, such as aspirin and ibuprofen; food allergies that cause an immune response to certain foods. Intestinal permeability is a recognized feature of several inflammatory and autoimmune diseases affecting the digestive system, including inflammatory bowel disease, Crohn's disease and celiac disease.

[0087] There are both pro-inflammatory and anti-inflammatory molecules or cytokines. The pro-inflammatory cytokines are secreted from Th1 cells, CD4⁺ cells, macrophages, and dendritic cells. They are characterized by production of several Interleukins (IL), IL-1, IL-2, IL-12, IL-7, IL-18, IFN-γ, and TNF-α. The key pro-inflammatory cytokines are IL-1, IL-6, and TNF-α. Pro-inflammatory chemokines are produced by cells primarily to recruit leukocytes to the sites of infection or injury. They are crucial for coordinating cell mediated immune response and play a critical role in modulating the immune system. Pro-inflammatory cytokines generally regulate growth, cell activation, differentiation, and homing of the immune cells to the sites of infection with the aim to control and eradicate intracellular pathogens. IL-1 is subdivided in IL-1α and IL-1β. IL-1β is potent pro-inflammatory cytokine, induced mainly by lymphocytes, macrophages, and monocytes in response to microbial molecules. The anti-inflammatory cytokines are a series of immunoregulatory molecules that control the proinflammatory cytokine response. Anti-inflammatory cytokines include IL-10, which inhibits cytokine production and mononuclear cell function, IL-12, which activates NK cells, IL-22, which stimulates cell survival and proliferation, and TGF-β, which Inhibits T and B cell proliferation, Anti-inflammatory interleukins include interleukin (IL)-1 receptor antagonist, 11-4, IL-6, IL-10, IL-13, IL-19 and IL-35.

[0088] The studies set out and provided herein demonstrate that administration of the probiotic compositions described results in reduced intestinal permeability, particularly in an established leaky gut animal model. The studies set out and provided herein further demonstrate that administration of the probiotic compositions described results in reduced levels of pro-inflammatory cytokines, including IL-6, TNF-α, IFN-γ, and IL-1β. The studies further show that administration of the probiotic compositions provided herein results in increased levels of the anti-inflammatory molecules or cytokines IL-22 and IL-10.

[0089] In some embodiments, the compositions disclosed herein reduce pro-inflammatory molecules or cytokines by at least 10%, at least 20%, at least 25%, at least 50%, at least 60%, at least 80%. In some embodiments, the compositions disclosed herein reduce pro-inflammatory molecules or cytokines by at least 1 fold, 2 fold, 3 fold, 4 fold. In some embodiments, the compositions disclosed herein reduce pro-inflammatory molecules or cytokines IL-6, TNF-α, IFN-γ, and/or IL-1β by at least 10%, at least 20%, at least 25%, at least 50%, at least 60%, at least 80%. In some embodiments, the compositions disclosed herein reduce pro-inflammatory molecules or cytokines IL-6, TNF-α, IFN-γ, and/or IL-1β by at least 1 fold, 2 fold, 3 fold, 4 fold, 6 fold, S fold, 10 fold. In some embodiments, the compositions disclosed herein increase anti-inflammatory molecules or cytokines by at least 10%, at least 20%, at least 25%, at least 50%, at least 60%, at least 80%. In some embodiments, the compositions disclosed herein increase anti-inflammatory molecules or cytokines by at least 1 fold, 2 fold, 3 fold, 4 fold, 6 fold, S fold, 10 fold. In some embodiments, the compositions disclosed herein increase anti-inflammatory molecules or cytokines IL-22 and/or IL-10 by at least 10%, at least 20%, at least 25%, at least 50%, at least 60%, at least 80%. In some embodiments, the compositions disclosed herein increase anti-inflammatory molecules or cytokines IL-22 and/or IL-10 by at least 1 fold, 2 fold, 3 fold, 4 fold, 6 fold, 8 fold, 10 fold.

[0090] In some embodiments, the compositions disclosed herein reduce intestinal permeability or leaky gut by at least 5%, at least 10%, at least 20%, at least 25%, at least 30%, at least 40%, at least 50%, at least 60%, at least 70%, or at least 80%. In some embodiments, the compositions disclosed herein reduce intestinal permeability or leaky gut by at least 1 fold, 2 fold, 3 fold, 4 fold, 6 fold, 8 fold, 10 fold.

[0091] The composition of one or more L reuteri strain may be combined with one or more other or anti-inflammatory agent, molecule or cytokine or immune modulator. Immune modulators may include cytokines, hormones, antibodies which modulate, including to particularly reduce or alleviate the immune response or inflammatory response. The composition of one or more L reuteri strain may be combined with one or more anti-inflammatory drug or immune suppressants/immune modulator, including the one or more drug or modifier described herein. The composition of one or more L reuteri strain may be combined with one or more anti-inflammatory, nonsteroidal anti-inflammatory drug (NSAID), steroid, biologic, antibiotic, or anti-diarrheal agent, including as described above. The composition of one or more L reuteri strain may be combined with an anti-inflammatory cytokine such as IL-10, IL-12 or IL-22. The composition of one or more L reuteri strain may be combined with an IL-1 inhibitor, such as an IL-1 receptor antagonist.

[0092] As used herein, pathogen includes Salmonella, Clostridium, Campylobacter, Staphylococcus, Streptococcus, and E. coli bacterium. Further examples of pathogens include Salmonella typhimurium, Salmonella infantis, Salmonella Hadar, Salmonella enteritidis, Salmonella Newport, Salmonella Kentucky, Clostridium perfringens, Staphylococcus aureus, Streptococcus uberis, Streptococcus suis, Escherichia coli, Campylobacter jejuni, and Fusobacterium necrophorum.

[0093] The compositions may be administered orally, parentally, nasally, or mucosally. Parental administration includes subcutaneous, intramuscular and intravenous administration.

[0094] In some aspects, administration includes feeding the poultry, or spraying onto the poultry. In other aspects, administration includes on ovo administration or in ovo administration. In an embodiment, administered comprises in ovo administration. In an embodiment, administered comprises spray administration. In an embodiment, administered comprises immersion, intranasal, intramammary, topical, or inhalation.

[0095] In some aspects the animal is vaccinated in conjunction with administration. The animal may be vaccinated prior to administration of the compositions disclosed herein. The animal may be vaccinated with an coccidiosis vaccine. Coccidiosis vaccines are known in the art, for example, COCCIVAC.

[0096] In some embodiments, administration is by way of injection or infusion. In one embodiment, the composition is administered to a cow by way of intra-mammary infusion.

[0097] In an embodiment of the method(s), the method does not comprise administration of an antibiotic.

[0098] In some embodiments, the compositions or combinations may additionally include one or more prebiotic. In some embodiments, the compositions may be administered along with or may be coadministered with one or more prebiotic. Prebiotics may include organic acids or non-digestible feed ingredients that are fermented in the lower gut and may serve to select for beneficial bacteria. Prebiotics may include mannan-oligosaccharides, fructo-oligosaccharides, galacto-oligosaccharides, chito-oligosaccharides, isomalto-oligosaccharides, pectic-oligosaccharides, xylo-oligosaccharides, and lactose-oligosaccharides.

[0099] The compositions may further include one or more component or additive. The one or more component or additive may be a component or additive to facilitate administration, for example by way of a stabilizer or vehicle, or by way of an additive to enable administration to an animal such as by any suitable administrative means, including in aerosol or spray form, in water, in feed or in an injectable form. Administration to an animal may be by any known or standard technique. These include oral ingestion, gastric intubation, or broncho-nasal spraying. The compositions disclosed herein may be administered by immersion, intranasal, intramammary, topical, mucosally, or inhalation. When the animal is a bird the treatment may be administered in ovo or by spray inhalation.

[0100] Compositions may include a carrier in which the bacterium or any such other components is suspended or dissolved. Such carrier(s) may be any solvent or solid or encapsulated in a material that is non-toxic to the inoculated animal and compatible with the organism. Suitable pharmaceutical carriers include liquid carriers, such as normal saline and other non-toxic salts at or near physiological concentrations, and solid carriers, such as talc or sucrose and which can also be incorporated into feed for farm animals. When used for administering via the bronchial tubes, the composition is preferably presented in the form of an aerosol. A dye may be added to the compositions hereof, including to facilitate checking or confirming whether an animal has ingested or breathed in the composition.

[0101] When administering to animals, including humans or farm animals, administration may include orally or by injection. Oral administration can include by bolus, tablet or paste, or as a powder or solution in feed, food, or drinking water. Administration may be by ingestion. The method of administration will often depend on the species being feed or administered, the numbers of animals being fed or administered, and other factors such as the handling facilities available and the risk of stress for the animal.

[0102] The dosages required will vary and need be an amount sufficient to induce a response or to effect a biological or phenotypic change or response expected or desired. Routine experimentation will establish the required amount. Increasing amounts or multiple dosages may be implemented and used as needed.

[0103] The strains disclosed herein demonstrate certain phenotypic properties. Without wishing to be bound by theory, it is believed that these phenotypic properties at least contribute to increasing animal health.

[0104] In some embodiments, the isolated strains secrete at least one of cyclic dipeptides (cyclo(his-phe) and cyclo (phe-pro), short chain fatty acids (2-hydroxy-3-methylvalerate and alpha-hydroxyisocaproate), betaine, dimethylglycine, essential amino acids (e.g., allo-threonine, phosphothreonine, histidine, lysine, phenylalanine, tryptophan, leucine, isoleucine, and cysteine s-sulfate), nucleotides (e.g., adenosine 5′-monophosphate (AMP), uridine 5′-monophosphate (UMP), cytidine 5′-monophosphate (5′-CMP), and cytidine 2′3′-cyclicmonophosphate), myo-inositol, and indolin-2-one. Some of the aforementioned molecules provide beneficial characteristics to the host, including increased weight, pro-inflammatory effects, and antibiotic effects.

[0105] In some embodiments, the composition including the isolated first Lactobacillus reuteri strain (strain 3632) and the isolated second Lactobacillus reuteri strain (strain 3630) in combination, will secrete certain beneficial molecules in larger quantities than when individually cultured. For example, with combinations and cocultures of strains 3630 and 3632, increased levels of each of the following are provided or secreted (as determined from culture supernatants): dimethylglycine, allo-threonine, 1-methyl-4-imidazoleacetate, 4-imidazoleacetate, lysine, N6-methyllysine, N6, N6-dimethyllysine, 5-aminovalerate, and tyrosine, 4-hydroxyphenylpyruvate, indolacetate, and gamma-glutamylglutamine, glucose 6-phosphate, 4-hydroxyl-2-oxoglutaric acid, and myo-inositol, Uridine 5′-monophosphate (UMP), Cytidine 5′-monophosphate (5′-CMP), 3′-5′-uridylyluridine, O-sulfo-L-tyrosine, indole 3 acetamide, indolin-2-one and daidzein. In particular, when the strains 3630 and 3632 are combined in cultures or are grown together, significant and synergistic amounts (more than just additive) of some beneficial molecules are present or secreted. In particular embodiments, significant amounts of the molecules 4-hydroxyphenylpyruvate and glucose 6-phosphate are secreted or present with combinations of strains 3630 and 3632, or with compositions including a mix of about equal amounts of strains 3630 and 3632.

[0106] In some embodiments, the animal administered the composition exhibits a shift in the microbiome content of the gastrointestinal tract. For example, there may be an increase in the amount of bacteroidaceae bacteria in the gut of an animal that has been administered the composition described herein, as compared to an animal that was not administered the composition.

[0107] In embodiments of the present invention, the composition includes a combination of two isolated Lactobacillus reuteri strains.

[0108] Without wishing to be bound by a particular theory, it is believed that the probiotic composition of the present disclosure can alleviate leaky gut, reduce intestinal permeability, and reduce intestinal inflammation. In this regard, and in particular, the composition is believed to correct or address the altered and compromised intestinal microbial community with chronic alcohol consumption and intestinal diseases and inflammation and for methods that provide beneficial bacteria and/or molecules to the gastrointestinal tract of an animal and improve animal health, particularly in animals consuming alcohol on a chronic or binge basis, animals with leaky gut, increased intestinal permeability and intestinal-derived or intestinal-associated inflammation. Intestinal-derived or intestinal-associated inflammation can include inflammatory bowel diseases (IBD), including ulcerative colitis and Crohn's disease.

[0109] Anti-inflammatory drugs or immune suppressants/immune modulators are often the first step in the treatment of intestinal inflammation, including associated with IBD, such as ulcerative colitis, typically for mild to moderate disease. Time-limited courses of corticosteroids are also used to induce remission. Nonsteroidal anti-inflammatory drugs (NSAIDs) have been used for the treatment of inflammation, including intestinal inflammatory diseases. NSAIDs include non-prescription drugs acetylsalicylate (aspirin), ibuprofen (Advil, Motrin TB) and naproxen sodium (Aleve, Naprosyn) and prescription NSAIDs such as etodolac (Lodine) and diclofenac (Voltaren). Anti-inflammatories include aminosalicylates, such as mesalamine (Delzicol, Rowasa, others), balsalazide (Colazal) and olsalazine (Dipentum). Steroids are anti-inflammatory or immunosuppressants agents that can be prescribed and utilized in treatment. Examples include glucocotricosteroids or corticosteroids such as prednisone, cortisone and methylprednisolone. Time-limited courses of corticosteroids are also used to reduce inflammation. Some examples of immunosuppressant drugs include azathioprine (Azasan, Imuran), mercaptopurine (Purinethol, Purixan) and methotrexate (Trexall).

[0110] Biologics—genetically engineered proteins which target a specific aspect or part of the immune system and act as immunosuppressants or neutralize proteins causing inflammation—are an increasingly important component in treatment of significant inflammatory conditions and IBD. Biologics include abatacept (Orencia), adalimumab (Humira), anakinra (Kineret), baricitinib (Olumiant), certolizumab (Cimzia), etanercept (Enbrel), golimumab (Simponi), infliximab (Remicade), rituximab (Rituxan), sarilumab (Kevzara), tocilizumab (Actemra) and tofacitinib (Xeljanz), vedolizumab (Entyvio), ustekinumab (Stelara), and risankizumab (Skyrizi). Adalimumab, etanercept, infliximab, golimumab and certolizumab target tumor necrosis factor (TNF). Rituximab is effective against B cells. Anakinra (interleukin-1 receptor antagonist (IL-1Ra)) blocks the action of the proinflammatory master cytokine interleukin-1 (IL-1), a master cytokine. Abatacept targets T cells. Adalimumab, etanercept, infliximab, golimumab and certolizumab target TNF (Lis K et al (2014) Arch Med Sci 10(6):1175-1185). Rituximab depletes B cells. Orally delivered agents also known as “small molecules” available for intestinal inflammation and IBD treatment include tofacitinib (Xeljanz), upadacitinib (Rinvoq) and ozanimod (Zeposia).

[0111] Antibiotics may be used in addition to other medications or when infection is a concern. Frequently prescribed antibiotics include ciprofloxacin (Cipro) and metronidazole (Flagyl). Anti-diarrheal medications, such as loperamide (Imodium), and/or fiber supplements may also be utilized.

[0112] In embodiments of the invention, including the methods provided, the probiotic compositions described herein may be combined, co-administered, or integrated in and with treatment protocols and agents utilized to reduce inflammation or modulate the immune system. In embodiments of the compositions or methods, the L reuteri strains 3632 and 3630 are combined or administered in conjunction with, including before, after, or in series, including in altering series of administration, treatment protocols and agents utilized to reduce inflammation or modulate the immune system.

[0113] The agents or treatment protocols to be combined or included may include one or more anti-inflammatory drugs or immune suppressants/immune modulators described above. The agents or treatment protocols to be combined or included may be selected from one or more anti-inflammatory, Nonsteroidal anti-inflammatory drug (NSAID), steroid, biologic, antibiotic, or anti-diarrheal agent, including as described above.

[0114] Cytokine profiling is typically done using ELISA using lung/tracheal/intestinal homogenates or serum samples. In the absence of reagents needed for ELISA (antibodies for detection of various cytokines) cytokine profiling is done using qRT-PCR on mRNA isolated from RNAlater preserved samples. For example, tissue samples can be collected in RNAlater for cytokine mRNA isolation and/or examination either qualitatively and/or quantitatively by qRT-PCR. Relevant and proinflammatory cytokines include, but are not limited to IL-1, IL-2, IL-12, IL-17, IL-18, IFN-γ, and TNF-α. The key pro-inflammatory cytokines are IL-1, TL-6, and TNF-α. Relevant and anti-inflammatory cytokines include IL-10, IL-22 and IL-12.

[0115] In an embodiment of the invention, a composition is provided for alleviating the effects of chronic alcohol consumption and increased intestinal permeability in an animal. In an embodiment of the invention, a composition is provided for reducing susceptibility to an infectious agent or pathogen, including such as bacteria, in an animal with or under conditions of chronic and/or binge alcohol consumption. In an embodiment of the invention, a composition is provided for reducing intestinal inflammation associated with gastrointestinal disease including or such as inflammatory bowel disease (IBD) or celiac disease in an animal or subject. In an embodiment of the invention, a composition is provided for alleviating the symptoms and clinical pathologies, such as pain and inflammation, associated with gastrointestinal disease including or such as inflammatory bowel disease (IBD), Crohn's disease, ulcerative colitis, or celiac disease in an animal or subject. In an embodiment, a composition is provided comprising Lactobacillus strains, particularly strain 3630 (PTA-126787) and strain 3632 (PTA-126788). In an embodiment, a composition is provided comprising Lactobacillus strains, particularly strain 3630 (PTA-126787) and strain 3632 (PTA-126788) in about a 1:1 strain ratio based on CFU/strain per kg, or per mg in the composition. In an embodiment, a composition is provided comprising Lactobacillus strains, particularly strain 3630 (PTA-126787) and strain 3632 (PTA-126788) in about a 1:1 strain ratio based on CFU/strain per kg, or per mg or per g of the animal or subject being administered the composition.

[0116] Binge-on-chronic alcohol feeding in animal models shifts gut microbiota diversity and functional capacity. In embodiments of the invention, compositions and methods are provided for alleviating or preventing intestinal dysbiosis under conditions of and in instances of chronic and/or binge alcohol consumption in an animal. In an embodiment, compositions and methods are provided for maintaining or restoring gut microbiota diversity with or under conditions of chronic and/or binge alcohol consumption in an animal. In an embodiment, compositions and methods are provided for protecting the gut and/or intestinal system from harm, alteration or disease with or under conditions of chronic and/or binge alcohol consumption in an animal. In an embodiment, compositions and methods are provided for preventing or alleviating leaky gut with or under conditions of chronic and/or binge alcohol consumption in an animal.

[0117] In an embodiment, compositions and methods are provided for reducing susceptibility to an infectious agent or pathogen, including such as bacteria, in an animal with or under conditions of chronic and/or binge alcohol consumption. In an embodiment, compositions and methods are provided for reducing susceptibility to an infectious agent or pathogen, including such as bacteria, in an animal with or under conditions of gastrointestinal disease or inflammation, including inflammatory bowel disease (IBD), Crohn's disease or celiac disease. In an embodiment, compositions and methods are provided for increasing resistance or maintaining protection against an infectious agent or pathogen, including such as bacteria, in an animal with or under conditions of chronic and/or binge alcohol consumption. As used herein, pathogen includes a bacteria that infects an animal including animals selected from a bird, human or non human animal, including non human animals such as chickens, turkey, dogs, cats, cattle, and swine. Pathogen includes Klebsiella, Salmonella, Clostridium, Campylobacter, Staphylococcus, Streptococcus, and E. coli bacterium.

[0118] In one embodiment, the compositions and methods are provided for reducing intestinal inflammation associated with gastrointestinal disease including or such as inflammatory bowel disease (IBD) or celiac disease in an animal or subject. Inflammatory bowel disease includes Crohn's disease and ulcerative colitis. In one embodiment, the compositions and methods are provided for reducing inflammation in the gut or intestine in an animal or subject.

[0119] In one embodiment, the compositions and methods are provided for alleviating the symptoms and clinical pathologies, such as pain and inflammation, associated with gastrointestinal disease including or such as inflammatory bowel disease (IBD), Crohn's disease, ulcerative colitis, or celiac disease in an animal or subject.

[0120] The methods include further administering one or more anti-inflammatory agent, molecule or cytokine or immunomodulatory to an animal or subject. The method includes further administering, including in combination in the composition, one or more anti-inflammatory agent, molecule or cytokine or immunomodulatory to an animal or subject.

[0121] In certain aspects of the disclosure, the isolated Lactobacillus reuteri strain exist as isolated and biologically pure cultures. It will be appreciated by one of skill in the art, that an isolated and biologically pure culture of a particular Lactobacillus reuteri strain, denotes that said culture is substantially free (within scientific reason) of other living organisms and contains only the individual Lactobacillus reuteri strain in question. The culture can contain varying concentrations of said isolated Lactobacillus reuteri strain. The present disclosure notes that isolated and biologically pure microbes often necessarily differ from less pure or impure materials.

[0122] In embodiments of the present invention, the composition includes one or more isolated Lactobacillus reuteri strains. In embodiments of the present invention, the composition includes a combination of two isolated Lactobacillus reuteri strains. In some embodiments of the present invention, the composition includes a combination of two or more isolated Lactobacillus reuteri strains. In embodiments of the present invention, the composition includes one or more isolated Lactobacillus reuteri strain and one or more other bacterial strain. In embodiments of the present invention, the composition includes two isolated Lactobacillus reuteri strains and one or more other bacterial strain. In embodiments of the present invention, the composition includes the Lactobacillus reuteri strain denoted 3632 and one or more other bacterial strain. In embodiments of the present invention, the composition includes the Lactobacillus reuteri strain denoted 3630 and one or more other bacterial strain. The other or one or more other bacterial strain may be another Lactobacillus strain, a Bacillus strain, a Salmonella strain.

[0123] In certain aspects of the disclosure, the isolated Lactobacillus reuteri strain exists as isolated and biologically pure cultures. It is appreciated by one of skill in the art, that an isolated and biologically pure culture of a particular Lactobacillus reuteri strain, denotes that said culture is substantially free (within scientific reason) of other living organisms and contains only the individual Lactobacillus reuteri strain in question. The culture can contain varying concentrations of said isolated Lactobacillus reuteri strain. The present disclosure notes that isolated and biologically pure microbes often necessarily differ from less pure or impure materials.

[0124] In some embodiments of the present invention, the composition includes a combination of two isolated Lactobacillus reuteri strains. In some embodiments of the present invention, the composition includes a combination of three isolated Lactobacillus reuteri strains.

### Definitions

[0125] As used herein, “isolated” means that the subject isolate has been separated from at least one of the materials with which it is associated in a particular environment, for example, its natural environment.

[0126] Thus, an “isolate” does not exist in its naturally occurring environment; rather, it is through the various techniques known in the art that the microbe has been removed from its natural setting and placed into a non-naturally occurring state of existence. Thus, the isolated strain or isolated microbe may exist as, for example, a biologically pure culture in association with an acceptable carrier.

[0127] As used herein, “individual isolates” should be taken to mean a composition, or culture, comprising a predominance of a single species, or strain, of microorganism, following separation from one or more other microorganisms. The phrase should not be taken to indicate the extent to which the microorganism has been isolated or purified. However, “individual isolates” can include substantially only one species, or strain, of microorganism.

[0128] As used herein, the term “bacterial consortia”, “bacterial consortium”, “microbial consortia”, or “microbial consortium” refers to a subset of a microbial community of individual microbial species, or strains of a species, which can be described as carrying out a common function, or can be described as participating in, or leading to, or correlating with, a recognizable parameter, such as a phenotypic trait of interest (e.g. increasing vaccine efficacy). The community may comprise two or more species, or strains of a species (eg., Lactobacillus reuteri strains 3632 and 3630), of microbes. In some instances, the microbes coexist within the community symbiotically.

[0129] As used herein, the terms “colonize” and “colonization” include “temporarily colonize” and “temporary colonization”.

[0130] As used herein, “probiotic” refers to a substantially pure microbe (i.e., a single isolate) or a mixture of desired microbes, and may also include any additional components (e.g., carrier) that can be administered to an animal to provide a beneficial health effect. Probiotics or microbial compositions of the invention may be administered with an agent or carrier to allow the microbes to survive the environment of the gastrointestinal tract, i.e., to resist low pH and to grow in the gastrointestinal environment.

[0131] As used herein, “carrier”, “acceptable carrier”, or “pharmaceutical carrier” refers to a diluent, adjuvant, excipient, or vehicle with which the compound is administered. Such carriers can be sterile liquids, such as water and oils, including those of petroleum, animal, vegetable, or synthetic origin; such as peanut oil, soybean oil, mineral oil, sesame oil, and the like. Water or aqueous solution saline solutions and aqueous dextrose and glycerol solutions are preferably employed as carriers, in some embodiments as injectable solutions. Alternatively, the carrier can be a solid dosage form carrier, including but not limited to one or more of a binder (for compressed pills), a glidant, an encapsulating agent, a flavorant, and a colorant. The choice of carrier can be selected with regard to the intended route of administration and standard pharmaceutical practice. See Hardee and Baggo (1998. Development and Formulation of Veterinary Dosage Forms. 2nd Ed. CRC Press. 504 pg.); and E. W. Martin (1970. Remington's Pharmaceutical Sciences. 17th Ed. Mack Pub. Co.).

[0132] As used herein, “delivery” or “administration” means the act of providing a beneficial activity to a host. The delivery may be direct or indirect. An administration could be by an oral, nasal, or mucosal route. For example without limitation, an oral route may be an administration through drinking water, a nasal route of administration may be through a spray or vapor, and a mucosal route of administration may be through direct contact with mucosal tissue. Mucosal tissue is a membrane rich in mucous glands such as those that line the inside surface of the nose, mouth, esophagus, trachea, lungs, stomach, gut, intestines, and anus. In the case of birds, administration may be in ovo, i.e. administration to a fertilized egg. In ovo administration can be via a liquid which is sprayed onto the egg shell surface, or an injected through the shell.

[0133] As used herein, the terms “treating”, “to treat”, or “treatment”, include restraining, slowing, stopping, reducing, ameliorating, or reversing the progression or severity of an existing symptom, disorder, condition, or disease. A treatment may also be applied prophylactically to prevent or reduce the incidence, occurrence, risk, or severity of a clinical symptom, disorder, condition, or disease.

[0134] As used herein, “subject” includes bird, poultry, a human, or a non-human mammal. Specific examples include chickens, turkey, dogs, cats, cattle, and swine. The chicken may be a broiler chicken, egg-laying or egg-producing chicken. As used herein, the term “poultry” includes domestic fowl, such as chickens, turkeys, ducks, quail, and geese.

[0135] As used herein, the term “immunogenic” means than an agent is capable of eliciting an immune response, including an innate, humoral, or cellular immune response, and both. “Immunogenic” includes “immunomodulatory”. An immunogenic composition is a composition that elicits an innate, humoral, or cellular immune response, or both.

[0136] As used herein, the term “immune response” includes a response by a subject that involves generation of antibodies that bind to an antigen (i.e., an antibody response). This does not exclude generation of a cell-mediated response.

[0137] By “stimulating” is meant directly or indirectly increasing the level and/or functional activity of a target system (e.g., immune system). In certain embodiments, “stimulation” or “stimulating” means that a desired/selected response is more efficient (e.g., at least 10%, 20%, 30%, 40%, 50%, 60% or more), more rapid (e.g., at least 10%, 20%, 30%, 40%, 50%, 60% or more), greater in magnitude (e.g., at least 10%, 20%, 30%, 40%, 50%, 60% or more), and/or more easily induced (e.g., at least 10%, 20%, 30%, 40%, 50%, 60% or more) than if the vaccine had been used alone.

[0138] Any examples or illustrations given herein are not to be regarded in any way as restrictions on, limits to, or express definitions of any term or terms with which they are utilized. Instead, these examples or illustrations are to be regarded as being described with respect to one particular embodiment and as being illustrative only. Those of ordinary skill in the art will appreciate that any term or terms with which these examples or illustrations are utilized will encompass other embodiments which may or may not be given therewith or elsewhere in the specification and all such embodiments are intended to be included within the scope of that term or terms. Language designating such nonlimiting examples and illustrations includes, but is not limited to: “for example,” “for instance,” “e.g.,” and “in one embodiment.” In this specification, groups of various parameters containing multiple members are described. Within a group of parameters, each member may be combined with any one or more of the other members to make additional sub-groups. For example, if the members of a group are a, b, c, d, and e, additional sub-groups specifically contemplated include any one, two, three, or four of the members, e.g., a and c; a, d, and e; b, c, d, and e; etc.

[0139] Throughout this specification, quantities are defined by ranges, and by lower and upper boundaries of ranges. Each lower boundary can be combined with each upper boundary to define a range. The lower and upper boundaries should each be taken as a separate element. Two lower boundaries or two upper boundaries may be combined to define a range.

### Deposit Information

[0140] Lactobacillus reuteri strain “3630” was deposited on 19 Jun. 2020 according to the Budapest Treaty in the American Type Culture Collection (ATCC), ATCC Patent Depository, 10801 University Boulevard, Manassas, Va., 20110, USA. The deposit has been assigned ATCC Patent Deposit Number PTA-126787.

[0141] Lactobacillus reuteri strain “3632” was deposited on 19 Jun. 2020 according to the Budapest Treaty in the American Type Culture Collection (ATCC), ATCC Patent Depository, 10801 University Boulevard, Manassas, Va., 20110, USA. The deposit has been assigned ATCC Patent Deposit Number PTA-126788.

[0142] Access to the deposits is available during the pendency of this application to persons determined by the Commissioner of Patents and Trademarks to be entitled thereto under 37 C.F.R. § 1.14 and 35 U.S.C. § 122. Upon allowance of any embodiments in this application, all restrictions on the availability to the public of the variety is irrevocably removed.

[0143] The deposits is maintained in the ATCC depository, which is a public depository, for a period of 30 years, or 5 years after the most recent request, or for the effective life of the patent, whichever is longer, and is replaced if a deposit becomes nonviable during that period.

[0144] The following embodiments and aspects illustrate and are not intended to limit scope of the present invention. Instead, these embodiments and aspects provide guidance to any skilled artisan on how to prepare and use compositions and methods taught by the present invention, where such skilled artisans will appreciate that modifications may be made without departing from the spirit and scope of the invention. The present disclosure is exemplified by specific embodiments below.

### EMBODIMENTS

[0145] 1. A composition having at least one isolated Lactobacillus reuteri strain, wherein said composition increases animal health when an effective amount is administered to an animal, as compared to an animal not administered the composition.

[0146] 2. A composition having at least one of an isolated first Lactobacillus reuteri strain and an isolated second Lactobacillus reuteri strain, wherein said composition increases animal health when an effective amount is administered to an animal, as compared to an animal not administered the composition.

[0147] 3. A composition having at least one isolated Lactobacillus reuteri strain, wherein said composition increases animal health, including in alleviating the effects of chronic alcohol consumption, leaky gut, increased intestinal permeability and/or intestinal inflammation, when an effective amount is administered to an animal, as compared to an animal not administered the composition.

[0148] 4. A composition having at least one of an isolated first Lactobacillus reuteri strain and an isolated second Lactobacillus reuteri strain, wherein said composition increases animal health, including in alleviating the effects of chronic alcohol consumption, leaky gut, increased intestinal permeability and/or intestinal inflammation, when an effective amount is administered to an animal, as compared to an animal not administered the composition.

[0149] 5. The composition of embodiments 2 or 4, wherein:
[0150] (a) the isolated first Lactobacillus reuteri strain has a genomic nucleic acid sequence including at least one of SEQ ID NOs: 49-55, sequences having one or more nucleic acid sequence difference from the sequence of at least one of SEQ ID NOs: 49-55, sequences having at least one nucleic acid sequence difference from the sequence of at least one of SEQ ID NOs: 49-55 and further having at least 97%, at least 98%, at least 99% or at least 99.5% sequence identity with one or more of SEQ ID NOs: 49-55, sequences having at least 98%, at least 98.5%, at least 99%, or at least 99.5% sequence identity to SEQ ID NOs: 49-55, and
[0151] (b) the isolated second Lactobacillus reuteri strain has a genomic nucleic acid sequence including at least one of SEQ ID NOs: 44-48, sequences having one or more nucleic acid sequence difference from the sequence of at least one of SEQ ID NOs: 44-48, sequences having at least one nucleic acid sequence difference from the sequence of at least one of SEQ ID NOs: 44-48 and further having at least 97%, at least 98%, at least 99% or at least 99.5% sequence identity with one or more of SEQ ID NOs: 44-48, sequences having at least 98%, at least 98.5%, at least 99%, or at least 99.5% sequence identity to SEQ ID NOs: 44-48.

[0152] 6. The composition of embodiment 2, 4 or 5, wherein:
[0153] (a) the isolated first Lactobacillus reuteri strain comprises or has a genomic nucleic acid sequence corresponding to the genomic nucleic acid sequence of ATCC strain PTA-126788, or a variant thereof comprising or having a nucleic acid sequence at least 98%, at least 98.5%, at least 99%, or at least 99.5% sequence identity to the genomic nucleic acid sequence of ATCC strain PTA-126788, and
[0154] (b) the isolated second Lactobacillus reuteri strain comprises or has a genomic nucleic acid sequence corresponding to the genomic nucleic acid sequence of ATCC strain PTA-126787, or a variant thereof comprising or having a nucleic acid sequence at least 98%, at least 98.5%, at least 99%, or at least 99.5% sequence identity to the genomic nucleic acid sequence of ATCC strain PTA-126787.

[0155] 7. The composition of embodiment 2, 4, 5 or 6, wherein the isolated first Lactobacillus reuteri strain is Lactobacillus reuteri strain 3632, which corresponds to ATCC Patent Deposit Number PTA-126788 and the isolated second Lactobacillus reuteri is Lactobacillus reuteri strain 3630, which corresponds to ATCC Patent Deposit Number PTA-126787.

[0156] 8. A composition for use in increasing animal health, including alleviating the effects of chronic alcohol consumption, leaky gut, increased intestinal permeability and/or intestinal inflammation, when an effective amount is administered to an animal, as compared to an animal not administered the composition and wherein the composition comprises at least one of an isolated first Lactobacillus reuteri strain and an isolated second Lactobacillus reuteri strain.

[0157] 9. A composition for use in reducing intestinal permeability or leaky gut in an animal comprising at least one of an isolated first Lactobacillus reuteri strain and an isolated second Lactobacillus reuteri strain.

[0158] 10. A composition for use in reducing inflammation, including intestinal-derived or intestinal-associated inflammation in an animal comprising at least one of an isolated first Lactobacillus reuteri strain and an isolated second Lactobacillus reuteri strain.

[0159] 11. A composition for use in reducing intestinal inflammation associated with gastrointestinal disease including or such as inflammatory bowel disease (IBD), Crohn's disease, or celiac disease in an animal comprising at least one of an isolated first Lactobacillus reuteri strain and an isolated second Lactobacillus reuteri strain.

[0160] 12. The composition for use of any of embodiments 8, 9, 10 or 11, wherein:
[0161] (a) the isolated first Lactobacillus reuteri strain has a genomic nucleic acid sequence including at least one of SEQ ID NOs: 49-55, sequences having one or more nucleic acid sequence difference from the sequence of at least one of SEQ ID NOs: 49-55, sequences having at least one nucleic acid sequence difference from the sequence of at least one of SEQ ID NOs: 49-55 and further having at least 97%, at least 98%, at least 99% or at least 99.5% sequence identity with one or more of SEQ ID NOs: 49-55, sequences having at least 98%, at least 98.5%, at least 99%, or at least 99.5% sequence identity to SEQ ID NOs: 49-55, and
[0162] (b) the isolated second Lactobacillus reuteri strain has a genomic nucleic acid sequence including at least one of SEQ ID NOs: 44-48, sequences having one or more nucleic acid sequence difference from the sequence of at least one of SEQ ID NOs: 44-48, sequences having at least one nucleic acid sequence difference from the sequence of at least one of SEQ ID NOs: 44-48 and further having at least 97%, at least 98%, at least 99% or at least 99.5% sequence identity with one or more of SEQ ID NOs: 44-48, sequences having at least 98%, at least 98.5%, at least 99%, or at least 99.5% sequence identity to SEQ ID NOs: 44-48.

[0163] 13. The composition for use of any of embodiments 8, 9, 10, 11 or 12, wherein:
[0164] (a) the isolated first Lactobacillus reuteri strain comprises or has a genomic nucleic acid sequence corresponding to the genomic nucleic acid sequence of ATCC strain PTA-126788, or a variant thereof comprising or having a nucleic acid sequence at least 98%, at least 98.5%, at least 99%, or at least 99.5% sequence identity to the genomic nucleic acid sequence of ATCC strain PTA-126788, and
[0165] (b) the isolated second Lactobacillus reuteri strain comprises or has a genomic nucleic acid sequence corresponding to the genomic nucleic acid sequence of ATCC strain PTA-126787, or a variant thereof comprising or having a nucleic acid sequence at least 98%, at least 98.5%, at least 99%, or at least 99.5% sequence identity to the genomic nucleic acid sequence of ATCC strain PTA-126787.

[0166] 14. The composition for use of any of embodiments 8, 9, 10, 11, 12 or 13, wherein the isolated first Lactobacillus reuteri strain is Lactobacillus reuteri strain 3632, which corresponds to ATCC Patent Deposit Number PTA-126788 and the isolated second Lactobacillus reuteri is Lactobacillus reuteri strain 3630, which corresponds to ATCC Patent Deposit Number PTA-126787.

[0167] 15. A composition for reducing the production or expression of one or more proinflammatory cytokine in the intestine of an animal comprising at least one of an isolated first Lactobacillus reuteri strain and an isolated second Lactobacillus reuteri strain.

[0168] 16. A composition for reducing the production or expression of one or more proinflammatory cytokine selected from IL-6, TNF-α, IFN-γ and IL-1, including IL-1β, in the intestine of an animal comprising at least one of an isolated first Lactobacillus reuteri strain and an isolated second Lactobacillus reuteri strain.

[0169] 17. A composition for increasing the production or expression of one or more anti-inflammatory cytokine in the intestine of an animal comprising at least one of an isolated first Lactobacillus reuteri strain and an isolated second Lactobacillus reuteri strain.

[0170] 18. A composition for increasing the production or expression of one or more anti-inflammatory cytokine selected from IL-10 and IL-22 in the intestine of an animal comprising at least one of an isolated first Lactobacillus reuteri strain and an isolated second Lactobacillus reuteri strain.

[0171] 19. The composition of any of embodiments 15, 16, 17 or 18, wherein:
[0172] (a) the isolated first Lactobacillus reuteri strain has a genomic nucleic acid sequence including at least one of SEQ ID NOs: 49-55, sequences having one or more nucleic acid sequence difference from the sequence of at least one of SEQ ID NOs: 49-55, sequences having at least one nucleic acid sequence difference from the sequence of at least one of SEQ ID NOs: 49-55 and further having at least 97%, at least 98%, at least 99% or at least 99.5% sequence identity with one or more of SEQ ID NOs: 49-55, sequences having at least 98%, at least 98.5%, at least 99%, or at least 99.5% sequence identity to SEQ ID NOs: 49-55, and
[0173] (b) the isolated second Lactobacillus reuteri strain has a genomic nucleic acid sequence including at least one of SEQ ID NOs: 44-48, sequences having one or more nucleic acid sequence difference from the sequence of at least one of SEQ ID NOs: 44-48, sequences having at least one nucleic acid sequence difference from the sequence of at least one of SEQ ID NOs: 44-48 and further having at least 97%, at least 98%, at least 99% or at least 99.5% sequence identity with one or more of SEQ ID NOs: 44-48, sequences having at least 98%, at least 98.5%, at least 99%, or at least 99.5% sequence identity to SEQ ID NOs: 44-48.

[0174] 20. The composition for use of any of embodiments 15, 16, 17, 18 or 19, wherein:
[0175] (a) the isolated first Lactobacillus reuteri strain comprises or has a genomic nucleic acid sequence corresponding to the genomic nucleic acid sequence of ATCC strain PTA-126788, or a variant thereof comprising or having a nucleic acid sequence at least 98%, at least 98.5%, at least 99%, or at least 99.5% sequence identity to the genomic nucleic acid sequence of ATCC strain PTA-126788, and
[0176] (b) the isolated second Lactobacillus reuteri strain comprises or has a genomic nucleic acid sequence corresponding to the genomic nucleic acid sequence of ATCC strain PTA-126787, or a variant thereof comprising or having a nucleic acid sequence at least 98%, at least 98.5%, at least 99%, or at least 99.5% sequence identity to the genomic nucleic acid sequence of ATCC strain PTA-126787.

[0177] 21. The composition for use of any of embodiments 15, 16, 17, 18 19 or 20, wherein the isolated first Lactobacillus reuteri strain is Lactobacillus reuteri strain 3632, which corresponds to ATCC Patent Deposit Number PTA-126788 and the isolated second Lactobacillus reuteri is Lactobacillus reuteri strain 3630, which corresponds to ATCC Patent Deposit Number PTA-126787.

[0178] 22. The composition or composition for use of any of embodiments 1-21, wherein at least one of the first Lactobacillus strain and a second Lactobacillus strain secrete at least one of cyclic dipeptides, short chain fatty acids, betaine, dimethylglycine, essential amino acids, nucleotides, myo-inositol, and indolin-2-one.

[0179] 23. The composition according to any one of embodiments 1-22, wherein the composition comprises a ratio of isolated first Lactobacillus reuteri strain to isolated second Lactobacillus reuteri strain of 0.75-1.5:1.

[0180] 24. The composition according to any one of embodiments 1-23, wherein the composition comprises about equal amounts of the isolated first Lactobacillus reuteri strain and the isolated second Lactobacillus reuteri strain.

[0181] 25. The composition according to any one of embodiments 1-24, wherein the composition is formulated as animal feed, feed additive, food ingredient, water additive, water-mixed additive, consumable solution, consumable spray additive, consumable solid, consumable gel, injection, or combinations thereof.

[0182] 26. The composition according to embodiment 25, wherein the composition comprises animal feed.

[0183] 27. The composition according to any of embodiments 1-26, wherein the composition comprises the isolated first Lactobacillus reuteri strain in an amount of about 10²-10⁸ CFU/kg of the composition, about 10⁴-10⁷ CFU/kg of the composition, or about 10³-10⁵ CFU/kg of the composition.

[0184] 28. The composition according to any one of embodiments 1-26, wherein the composition comprises isolated second Lactobacillus reuteri strain in an amount of about 10²-10⁸ CFU/kg of the composition, about 10⁴-10⁷ CFU/kg of the composition, or about 10³-10⁵ CFU/kg of the composition.

[0185] 29. The composition according to any one of embodiments 1-27, wherein the composition comprises the isolated first Lactobacillus reuteri strain in an amount of about 10⁷ CFU/kg of the composition.

[0186] 30. The composition according to any one of embodiments 1-28, wherein the composition comprises isolated second Lactobacillus reuteri strain in an amount of about 10⁷ CFU/kg of the composition.

[0187] 31. The composition according to any one of embodiments 1-30, wherein the animal is bird, poultry, a human, or a non-human mammal.

[0188] 32. A method for reducing intestinal permeability, alleviating alcohol induced or disease related leaky gut syndrome, alleviating the intestinal and systemic effects of chronic alcohol consumption, including intestinal dysbiosis, and reducing inflammation, including intestinal-derived or intestinal-associated inflammation, all and any of which include administration of an effective amount of an immunogenic probiotic composition comprising at least one of an isolated first Lactobacillus reuteri strain and an isolated second Lactobacillus reuteri strain.

[0189] 33. A method for reducing intestinal permeability, alleviating alcohol induced or disease related leaky gut syndrome, alleviating the intestinal and systemic effects of chronic alcohol consumption, including intestinal dysbiosis, and reducing inflammation, including intestinal-derived or intestinal-associated inflammation, all and any of which include administration of an effective amount of an immunogenic probiotic composition comprising a combination of two or at least two Lactobacillus reuteri strains, including at least one of an isolated first Lactobacillus reuteri strain and an isolated second Lactobacillus reuteri strain.

[0190] 34. The method of embodiments 32 or 33, wherein:
[0191] (a) the isolated first Lactobacillus reuteri strain has a genomic nucleic acid sequence including at least one of SEQ ID NOs: 49-55, sequences having one or more nucleic acid sequence difference from the sequence of at least one of SEQ ID NOs: 49-55, sequences having at least one nucleic acid sequence difference from the sequence of at least one of SEQ ID NOs: 49-55 and further having at least 97%, at least 98%, at least 99% or at least 99.5% sequence identity with one or more of SEQ ID NOs: 49-55, sequences having at least 98%, at least 98.5%, at least 99%, or at least 99.5% sequence identity to SEQ ID NOs: 49-55, and
[0192] (b) the isolated second Lactobacillus reuteri strain has a genomic nucleic acid sequence including at least one of SEQ ID NOs: 44-48, sequences having one or more nucleic acid sequence difference from the sequence of at least one of SEQ ID NOs: 44-48, sequences having at least one nucleic acid sequence difference from the sequence of at least one of SEQ ID NOs: 44-48 and further having at least 97%, at least 98%, at least 99% or at least 99.5% sequence identity with one or more of SEQ ID NOs: 44-48, sequences having at least 98%, at least 98.5%, at least 99%, or at least 99.5% sequence identity to SEQ ID NOs: 44-48.

[0193] 35. The method of embodiments 32, 33 or 34, wherein:
[0194] (a) the isolated first Lactobacillus reuteri strain comprises or has a genomic nucleic acid sequence corresponding to the genomic nucleic acid sequence of ATCC strain PTA-126788, or a variant thereof comprising or having a nucleic acid sequence at least 98%, at least 98.5%, at least 99%, or at least 99.5% sequence identity to the genomic nucleic acid sequence of ATCC strain PTA-126788, and
[0195] (b) the isolated second Lactobacillus reuteri strain comprises or has a genomic nucleic acid sequence corresponding to the genomic nucleic acid sequence of ATCC strain PTA-126787, or a variant thereof comprising or having a nucleic acid sequence at least 98%, at least 98.5%, at least 99%, or at least 99.5% sequence identity to the genomic nucleic acid sequence of ATCC strain PTA-126787.

[0196] 36. The method of embodiments 32, 33, 34 or 35, wherein the isolated first Lactobacillus reuteri strain is Lactobacillus reuteri strain 3632, which corresponds to ATCC Patent Deposit Number PTA-126788 and the isolated second Lactobacillus reuteri is Lactobacillus reuteri strain 3630, which corresponds to ATCC Patent Deposit Number PTA-126787.

[0197] 37. The method of any of embodiments 32-36 comprising administering an effective amount of a probiotic composition comprising at least one Lactobacillus reuteri strain and one or more anti-inflammatory agent, molecule or cytokine to a subject or animal.

[0198] 38. The method of embodiment 37, wherein the one or more anti-inflammatory agent, molecule or cytokine is selected from one or more anti-inflammatory, nonsteroidal anti-inflammatory drug (NSAID), steroid, biologic, antibiotic, or anti-diarrheal agent.

[0199] 39. The method of embodiment 38, wherein the biologic targets a specific aspect or part of the immune system and acts as an immunosuppressant or neutralizes one or more protein causing inflammation.

[0200] 40. The method of any of embodiments 32-36, further comprising administering an effective amount of a prebiotic.

[0201] 41. The method of embodiment 40, wherein the prebiotic is selected from mannan-oligosaccharides, fructo-oligosaccharides, galacto-oligosaccharides, chito-oligosaccharides, isomalto-oligosaccharides, pectic-oligosaccharides, xylo-oligosaccharides, and lactose-oligosaccharides.

[0202] 42. A method of alleviating or modulating increased intestinal permeability or leaky gut in a subject comprising administering an effective amount of a probiotic composition comprising at least one of an isolated first Lactobacillus reuteri strain and an isolated second Lactobacillus reuteri strain.

[0203] 43. The method of embodiment 42, wherein:
[0204] (a) the isolated first Lactobacillus reuteri strain has a genomic nucleic acid sequence including at least one of SEQ ID NOs: 49-55, sequences having one or more nucleic acid sequence difference from the sequence of at least one of SEQ ID NOs: 49-55, sequences having at least one nucleic acid sequence difference from the sequence of at least one of SEQ ID NOs: 49-55 and further having at least 97%, at least 98%, at least 99% or at least 99.5% sequence identity with one or more of SEQ ID NOs: 49-55, sequences having at least 98%, at least 98.5%, at least 99%, or at least 99.5% sequence identity to SEQ ID NOs: 49-55, and
[0205] (b) the isolated second Lactobacillus reuteri strain has a genomic nucleic acid sequence including at least one of SEQ ID NOs: 44-48, sequences having one or more nucleic acid sequence difference from the sequence of at least one of SEQ ID NOs: 44-48, sequences having at least one nucleic acid sequence difference from the sequence of at least one of SEQ ID NOs: 44-48 and further having at least 97%, at least 98%, at least 99% or at least 99.5% sequence identity with one or more of SEQ ID NOs: 44-48, sequences having at least 98%, at least 98.5%, at least 99%, or at least 99.5% sequence identity to SEQ ID NOs: 44-48.

[0206] 44. The method of embodiments 42 or 43, wherein
[0207] (a) the isolated first Lactobacillus reuteri strain comprises or has a genomic nucleic acid sequence corresponding to the genomic nucleic acid sequence of ATCC strain PTA-126788, or a variant thereof comprising or having a nucleic acid sequence at least 98%, at least 98.5%, at least 99%, or at least 99.5% sequence identity to the genomic nucleic acid sequence of ATCC strain PTA-126788, and
[0208] (b) the isolated second Lactobacillus reuteri strain comprises or has a genomic nucleic acid sequence corresponding to the genomic nucleic acid sequence of ATCC strain PTA-126787, or a variant thereof comprising or having a nucleic acid sequence at least 98%, at least 98.5%, at least 99%, or at least 99.5% sequence identity to the genomic nucleic acid sequence of ATCC strain PTA-126787.

[0209] 45. The method of embodiments 42, 43 or 44, wherein the isolated first Lactobacillus reuteri strain is Lactobacillus reuteri strain 3632, which corresponds to ATCC Patent Deposit Number PTA-126788 and the isolated second Lactobacillus reuteri is Lactobacillus reuteri strain 3630, which corresponds to ATCC Patent Deposit Number PTA-126787.

[0210] 46. The method of any of embodiments 42-45, comprising administering an effective amount of a probiotic composition comprising at least one Lactobacillus reuteri strain and one or anti-inflammatory agent, molecule or cytokine.

[0211] 47. The method of embodiment 46, wherein the one or more anti-inflammatory agent, molecule or cytokine is selected from one or more anti-inflammatory, nonsteroidal anti-inflammatory drug (NSAID), steroid, biologic, antibiotic, or anti-diarrheal agent.

[0212] 48. The method of embodiment 47, wherein the biologic targets a specific aspect or part of the immune system and acts as an immunosuppressant or neutralizes one or more protein causing inflammation.

[0213] 49. The method of any of embodiments 42-45, further comprising administering an effective amount of a prebiotic.

[0214] 50. The method of embodiment 49, wherein the prebiotic is selected from mannan-oligosaccharides, fructo-oligosaccharides, galacto-oligosaccharides, chito-oligosaccharides, isomalto-oligosaccharides, pectic-oligosaccharides, xylo-oligosaccharides, and lactose-oligosaccharides.

[0215] 51. A method of alleviating or modulating increased intestinal permeability or leaky gut in a subject comprising administering an effective amount of a probiotic composition comprising administering an effective amount of an probiotic composition comprising at least one Lactobacillus reuteri strain wherein the at least one Lactobacillus reuteri strain comprises at least one sequence selected from SEQ ID NO:1-55 and sequences having at least 98%, at least 98.5%, at least 99%, or at least 99.5% sequence identity with at least one of SEQ ID NO: 1-55.

[0216] 52. The method of embodiment 51, wherein the at least one Lactobacillus reuteri strain includes at least one of: a nucleic acid sequence having at least 95%, at least 96%, at least 97%, at least 98%, or at least 99% sequence identity with SEQ ID NO:26, a nucleic acid sequence having at least 95%, at least 96%, at least 97%, at least 98%, or at least 99% sequence identity with SEQ ID NO: 1, a nucleic acid sequence having at least 95%, at least 96%, at least 97%, at least 98%, or at least 99% sequence identity with SEQ ID NO: 3, and a nucleic acid that encodes for an amino acid sequence having at least 95%, at least 96%, at least 97%, at least 98%, or at least 99% sequence identity with SEQ ID NO: 8.

[0217] 53. The method of embodiment 51, wherein the at least one Lactobacillus reuteri strain includes at least one of: a nucleic acid sequence having at least 95%, at least 96%, at least 97%, at least 98%, or at least 99% sequence identity with SEQ ID NO:25, a nucleic acid sequence having at least 95%, at least 96%, at least 97%, at least 98%, or at least 99% sequence identity with SEQ ID NO: 27, a nucleic acid sequence having at least 95%, at least 96%, at least 97%, at least 98%, or at least 99% sequence identity with SEQ ID NO: 28, and a nucleic acid sequence having at least 95%, at least 96%, at least 97%, at least 98%, or at least 99% sequence identity with SEQ ID NO: 29.

[0218] 54. The method of any of embodiments 51, 52 or 53, wherein the at least one Lactobacillus reuteri strain has a nucleic acid or amino acid sequence including at least one of SEQ ID NOs: 1-24, 26, and 49-55, sequences having at least one nucleic acid or amino acid sequence difference from the sequence of at least one of SEQ ID NOs: 1-24, 26, and 49-55, sequences having one or more nucleic acid or amino acid sequence difference from the sequence of at least one of SEQ ID NOs: 1-24, 26, and 49-55, sequences having at least one nucleic acid or amino acid sequence difference from the sequence of at least one of SEQ ID NOs: 1-24, 26, and 49-55 and further having at least 99% sequence identity with at least one of SEQ ID NOs: 1-24, 26, and 49-55, sequences having at least one nucleic acid or amino acid sequence difference from the sequence of at least one of SEQ ID NOs: 1-24, 26, and 49-55 and further having at least 99% sequence identity with one or more of SEQ ID NOs: 1-24, 26, and 49-55, sequences having at least 98%, at least 98.5%, at least 99%, or at least 99.5% sequence identity with at least one of SEQ ID NOs: 1-24, 26, and 49-55.

[0219] 55. The method of embodiment 51, 52, 53 or 54, wherein the at least one Lactobacillus reuteri strain has a genomic nucleic acid sequence including at least one of SEQ ID NOs: 49-55, sequences having one or more nucleic acid sequence difference from the sequence of at least one of SEQ ID NOs: 49-55, sequences having at least one nucleic acid sequence difference from the sequence of at least one of SEQ ID NOs: 49-55 and further having at least 97%, at least 98%, at least 99% or at least 99.5% sequence identity with one or more of SEQ ID NOs: 49-55, sequences having at least 98%, at least 98.5%, at least 99%, or at least 99.5% sequence identity to SEQ ID NOs: 49-55.

[0220] 56. The method of embodiment 51, 52, 53, 54 or 55, wherein the at least one Lactobacillus reuteri strain comprises or has a genomic nucleic acid sequence corresponding to the genomic nucleic acid sequence of ATCC strain PTA-126788, or a variant thereof comprising or having a nucleic acid sequence at least 98%, at least 98.5%, at least 99%, or at least 99.5% sequence identity to the genomic nucleic acid sequence of ATCC strain PTA-126788.

[0221] 57. The method of embodiment 56, wherein the at least one Lactobacillus reuteri strain is Lactobacillus reuteri strain 3632, which corresponds to ATCC Patent Deposit Number PTA-126788.

[0222] 58. The method of embodiment 51, wherein the at least one Lactobacillus reuteri strain has a nucleic acid sequence or amino acid sequence including at least one of SEQ ID NOs: 25, 27-43, and 44-48, sequences having at least 98%, at least 98.5%, at least 99%, or at least 99.5% sequence identity with at least one of SEQ ID NOs: 25, 27-43, and 44-48.

[0223] 59. The method of embodiment 51 or 58, wherein the at least one Lactobacillus reuteri strain has a nucleic acid or amino acid sequence including at least one of SEQ ID NOs: 25, 27-43, and 44-48, sequences having at least one nucleic acid or amino acid sequence difference from the sequence of at least one of SEQ ID NOs: 25, 27-43, and 44-48, sequences having one or more nucleic acid or amino acid sequence difference from the sequence of at least one of SEQ ID NOs: 25, 27-43, and 44-48, sequences having at least one nucleic acid or amino acid sequence difference from the sequence of at least one of SEQ ID NOs: 25, 27-43, and 44-48 and further having at least 99% sequence identity with at least one of SEQ ID NOs: 25, 27-43, and 44-48, sequences having at least one nucleic acid or amino acid sequence difference from the sequence of at least one of SEQ ID NOs: 25, 27-43, and 44-48 and further having at least 99% sequence identity with one or more of SEQ ID NOs: 25, 27-43, and 44-48, sequences having at least 98%, at least 98.5%, at least 99%, or at least 99.5% sequence identity with at least one of SEQ ID NOs: 25, 27-43, and 44-48.

[0224] 60. The method of embodiment 51, 58 or 59, wherein the at least one Lactobacillus reuteri strain has a genomic nucleic acid sequence including at least one of SEQ ID NOs: 44-48, sequences having one or more nucleic acid sequence difference from the sequence of at least one of SEQ ID NOs: 44-48, sequences having at least one nucleic acid sequence difference from the sequence of at least one of SEQ ID NOs: 44-48 and further having at least 97%, at least 98%, at least 99% or at least 99.5% sequence identity with one or more of SEQ ID NOs: 44-48, sequences having at least 98%, at least 98.5%, at least 99%, or at least 99.5% sequence identity to SEQ ID NOs: 44-48.

[0225] 61. The method of embodiment 58, 59 or 60, wherein the at least one Lactobacillus reuteri strain comprises or has a genomic nucleic acid sequence corresponding to the genomic nucleic acid sequence of ATCC strain PTA-126787, or a variant thereof comprising or having a nucleic acid sequence at least 98%, at least 98.5%, at least 99%, or at least 99.5% sequence identity to the genomic nucleic acid sequence of ATCC strain PTA-126787.

[0226] 62. The method of embodiment 51 or 61, wherein the at least one Lactobacillus reuteri strain is Lactobacillus reuteri strain 3630, which corresponds to ATCC Patent Deposit Number PTA-126787.

[0227] 63. The method of embodiment 51, wherein the at least one Lactobacillus strain comprises at least one of an isolated first Lactobacillus reuteri strain and an isolated second Lactobacillus reuteri strain.

[0228] 64. The method of embodiment 63, wherein:
[0229] (a) the isolated first Lactobacillus reuteri strain has a genomic nucleic acid sequence including at least one of SEQ ID NOs: 49-55, sequences having one or more nucleic acid sequence difference from the sequence of at least one of SEQ ID NOs: 49-55, sequences having at least one nucleic acid sequence difference from the sequence of at least one of SEQ ID NOs: 49-55 and further having at least 97%, at least 98%, at least 99% or at least 99.5% sequence identity with one or more of SEQ ID NOs: 49-55, sequences having at least 98%, at least 98.5%, at least 99%, or at least 99.5% sequence identity to SEQ ID NOs: 49-55, and
[0230] (b) the isolated second Lactobacillus reuteri strain has a genomic nucleic acid sequence including at least one of SEQ ID NOs: 44-48, sequences having one or more nucleic acid sequence difference from the sequence of at least one of SEQ ID NOs: 44-48, sequences having at least one nucleic acid sequence difference from the sequence of at least one of SEQ ID NOs: 44-48 and further having at least 97%, at least 98%, at least 99% or at least 99.5% sequence identity with one or more of SEQ ID NOs: 44-48, sequences having at least 98%, at least 98.5%, at least 99%, or at least 99.5% sequence identity to SEQ ID NOs: 44-48.

[0231] 65. The method of embodiments 63 or 64, wherein
[0232] (a) the isolated first Lactobacillus reuteri strain comprises or has a genomic nucleic acid sequence corresponding to the genomic nucleic acid sequence of ATCC strain PTA-126788, or a variant thereof comprising or having a nucleic acid sequence at least 98%, at least 98.5%, at least 99%, or at least 99.5% sequence identity to the genomic nucleic acid sequence of ATCC strain PTA-126788, and
[0233] (b) the isolated second Lactobacillus reuteri strain comprises or has a genomic nucleic acid sequence corresponding to the genomic nucleic acid sequence of ATCC strain PTA-126787, or a variant thereof comprising or having a nucleic acid sequence at least 98%, at least 98.5%, at least 99%, or at least 99.5% sequence identity to the genomic nucleic acid sequence of ATCC strain PTA-126787.

[0234] 66. The method of embodiments 63, 64 or 65, wherein the isolated first Lactobacillus reuteri strain is Lactobacillus reuteri strain 3632, which corresponds to ATCC Patent Deposit Number PTA-126788 and the isolated second Lactobacillus reuteri is Lactobacillus reuteri strain 3630, which corresponds to ATCC Patent Deposit Number PTA-126787.

[0235] 67. The method of any of embodiments 51-66, comprising administering an effective amount of a probiotic composition comprising at least one Lactobacillus reuteri strain, and an anti-inflammatory agent, molecule or cytokine, to a subject or animal.

[0236] 68. The method of embodiment 67, wherein the one or more anti-inflammatory agent, molecule or cytokine is selected from one or more anti-inflammatory, nonsteroidal anti-inflammatory drug (NSAID), steroid, biologic, antibiotic, or anti-diarrheal agent.

[0237] 69. The method of embodiment 68, wherein the biologic targets a specific aspect or part of the immune system and acts as an immunosuppressant or neutralizes one or more protein causing inflammation.

[0238] 70. The method of any of embodiments 51-66, further comprising administering an effective amount of a prebiotic.

[0239] 71. The method of embodiment 70, wherein the prebiotic is selected from mannan-oligosaccharides, fructo-oligosaccharides, galacto-oligosaccharides, chito-oligosaccharides, isomalto-oligosaccharides, pectic-oligosaccharides, xylo-oligosaccharides, and lactose-oligosaccharides.

[0240] 72. A method of reducing intestinal permeability in a subject comprising administering an effective amount of a probiotic composition comprising at least one Lactobacillus reuteri strain.

[0241] 73. The method of embodiment 72, wherein the probiotic composition comprises at least one Lactobacillus reuteri strain wherein the at least one Lactobacillus reuteri strain comprises at least one sequence selected from SEQ ID NO:1-55 and sequences having at least 98%, at least 98.5%, at least 99%, or at least 99.5% sequence identity with at least one of SEQ ID NO:1-55.

[0242] 74. The method of embodiment 72 or 73, wherein the probiotic composition comprises at least one Lactobacillus reuteri strain having a genomic nucleic acid sequence including at least one of SEQ ID NOs: 49-55, sequences having one or more nucleic acid sequence difference from the sequence of at least one of SEQ ID NOs: 49-55, sequences having at least one nucleic acid sequence difference from the sequence of at least one of SEQ ID NOs: 49-55 and further having at least 97%, at least 98%, at least 99% or at least 99.5% sequence identity with one or more of SEQ ID NOs: 49-55, sequences having at least 98%, at least 98.5%, at least 99%, or at least 99.5% sequence identity to SEQ ID NOs: 49-55.

[0243] 75. The method of embodiment 72, wherein the probiotic composition comprises at least one of an isolated first Lactobacillus reuteri strain and an isolated second Lactobacillus reuteri strain.

[0244] 76. The method of embodiment 72 or 75, wherein:
[0245] (a) the isolated first Lactobacillus reuteri strain has a genomic nucleic acid sequence including at least one of SEQ ID NOs: 49-55, sequences having one or more nucleic acid sequence difference from the sequence of at least one of SEQ ID NOs: 49-55, sequences having at least one nucleic acid sequence difference from the sequence of at least one of SEQ ID NOs: 49-55 and further having at least 97%, at least 98%, at least 99% or at least 99.5% sequence identity with one or more of SEQ ID NOs: 49-55, sequences having at least 98%, at least 98.5%, at least 99%, or at least 99.5% sequence identity to SEQ ID NOs: 49-55, and
[0246] (b) the isolated second Lactobacillus reuteri strain has a genomic nucleic acid sequence including at least one of SEQ ID NOs: 44-48, sequences having one or more nucleic acid sequence difference from the sequence of at least one of SEQ ID NOs: 44-48, sequences having at least one nucleic acid sequence difference from the sequence of at least one of SEQ ID NOs: 44-48 and further having at least 97%, at least 98%, at least 99% or at least 99.5% sequence identity with one or more of SEQ ID NOs: 44-48, sequences having at least 98%, at least 98.5%, at least 99%, or at least 99.5% sequence identity to SEQ ID NOs: 44-48.

[0247] 77. The method of embodiments 72, 75 or 76, wherein
[0248] (a) the isolated first Lactobacillus reuteri strain comprises or has a genomic nucleic acid sequence corresponding to the genomic nucleic acid sequence of ATCC strain PTA-126788, or a variant thereof comprising or having a nucleic acid sequence at least 98%, at least 98.5%, at least 99%, or at least 99.5% sequence identity to the genomic nucleic acid sequence of ATCC strain PTA-126788, and
[0249] (b) the isolated second Lactobacillus reuteri strain comprises or has a genomic nucleic acid sequence corresponding to the genomic nucleic acid sequence of ATCC strain PTA-126787, or a variant thereof comprising or having a nucleic acid sequence at least 98%, at least 98.5%, at least 99%, or at least 99.5% sequence identity to the genomic nucleic acid sequence of ATCC strain PTA-126787.

[0250] 78. The method of embodiments 72, 75, 76 or 77, wherein the isolated first Lactobacillus reuteri strain is Lactobacillus reuteri strain 3632, which corresponds to ATCC Patent Deposit Number PTA-126788 and the isolated second Lactobacillus reuteri is Lactobacillus reuteri strain 3630, which corresponds to ATCC Patent Deposit Number PTA-126787.

[0251] 79. The method of embodiments 72-78, comprising administering an effective amount of a probiotic composition comprising at least one Lactobacillus reuteri strain and one or more an anti-inflammatory agent, molecule or cytokine.

[0252] 80. The method of embodiment 79, wherein the one or more an anti-inflammatory agent, molecule or cytokine is selected from one or more anti-inflammatory, nonsteroidal anti-inflammatory drug (NSAID), steroid, biologic, antibiotic, or anti-diarrheal agent.

[0253] 81. The method of embodiment 80, wherein the biologic targets a specific aspect or part of the immune system and acts as an immunosuppressant or neutralizes one or more protein causing inflammation.

[0254] 82. The method of any of embodiments 72-78, further comprising administering an effective amount of a prebiotic.

[0255] 83. The method of 82, wherein the prebiotic is selected from mannan-oligosaccharides, fructo-oligosaccharides, galacto-oligosaccharides, chito-oligosaccharides, isomalto-oligosaccharides, pectic-oligosaccharides, xylo-oligosaccharides, and lactose-oligosaccharides.

[0256] 84. A method for reducing intestinal inflammation associated with gastrointestinal disease including or selected from inflammatory bowel disease (IBD) or celiac disease in an animal comprising administering to the animal a composition comprising at least one of an isolated first Lactobacillus reuteri strain and an isolated second Lactobacillus reuteri strain.

[0257] 85. The method of embodiment 84, wherein:
[0258] (a) the isolated first Lactobacillus reuteri strain has a genomic nucleic acid sequence including at least one of SEQ ID NOs: 49-55, sequences having one or more nucleic acid sequence difference from the sequence of at least one of SEQ ID NOs: 49-55, sequences having at least one nucleic acid sequence difference from the sequence of at least one of SEQ ID NOs: 49-55 and further having at least 97%, at least 98%, at least 99% or at least 99.5% sequence identity with one or more of SEQ ID NOs: 49-55, sequences having at least 98%, at least 98.5%, at least 99%, or at least 99.5% sequence identity to SEQ ID NOs: 49-55, and
[0259] (b) the isolated second Lactobacillus reuteri strain has a genomic nucleic acid sequence including at least one of SEQ ID NOs: 44-48, sequences having one or more nucleic acid sequence difference from the sequence of at least one of SEQ ID NOs: 44-48, sequences having at least one nucleic acid sequence difference from the sequence of at least one of SEQ ID NOs: 44-48 and further having at least 97%, at least 98%, at least 99% or at least 99.5% sequence identity with one or more of SEQ ID NOs: 44-48, sequences having at least 98%, at least 98.5%, at least 99%, or at least 99.5% sequence identity to SEQ ID NOs: 44-48.

[0260] 86. The method of embodiments 84 or 85, wherein
[0261] (a) the isolated first Lactobacillus reuteri strain comprises or has a genomic nucleic acid sequence corresponding to the genomic nucleic acid sequence of ATCC strain PTA-126788, or a variant thereof comprising or having a nucleic acid sequence at least 98%, at least 98.5%, at least 99%, or at least 99.5% sequence identity to the genomic nucleic acid sequence of ATCC strain PTA-126788, and
[0262] (b) the isolated second Lactobacillus reuteri strain comprises or has a genomic nucleic acid sequence corresponding to the genomic nucleic acid sequence of ATCC strain PTA-126787, or a variant thereof comprising or having a nucleic acid sequence at least 98%, at least 98.5%, at least 99%, or at least 99.5% sequence identity to the genomic nucleic acid sequence of ATCC strain PTA-126787.

[0263] 87. The method of embodiments 84, 85 or 86, wherein the isolated first Lactobacillus reuteri strain is Lactobacillus reuteri strain 3632, which corresponds to ATCC Patent Deposit Number PTA-126788 and the isolated second Lactobacillus reuteri is Lactobacillus reuteri strain 3630, which corresponds to ATCC Patent Deposit Number PTA-126787.

[0264] 88. The method of embodiments 84-87, wherein the inflammatory bowel disease (IBD) is Crohn's disease or ulcerative colitis.

[0265] 89. A method for reducing the production or expression of one or more proinflammatory cytokine in the intestine of an animal comprising administering to the animal a composition comprising at least one of an isolated first Lactobacillus reuteri strain and an isolated second Lactobacillus reuteri strain.

[0266] 90. A method for reducing the production or expression of one or more proinflammatory cytokine selected from IL-6, TNF-α, IFN-γ and IL-1, including IL-1β, in the intestine of an animal comprising administering to the animal a composition comprising at least one of an isolated first Lactobacillus reuteri strain and an isolated second Lactobacillus reuteri strain.

[0267] 91. A method for increasing the production or expression of one or more anti-inflammatory cytokine in the intestine of an animal comprising administering to the animal a composition comprising at least one of an isolated first Lactobacillus reuteri strain and an isolated second Lactobacillus reuteri strain.

[0268] 92. A method for increasing the production or expression of one or more anti-inflammatory cytokine selected from IL-10 and IL-22 in the intestine of an animal comprising administering to the animal a composition comprising at least one of an isolated first Lactobacillus reuteri strain and an isolated second Lactobacillus reuteri strain.

[0269] 93. The method of any of embodiments 89, 90, 91 or 92, wherein:
[0270] (a) the isolated first Lactobacillus reuteri strain has a genomic nucleic acid sequence including at least one of SEQ ID NOs: 49-55, sequences having one or more nucleic acid sequence difference from the sequence of at least one of SEQ ID NOs: 49-55, sequences having at least one nucleic acid sequence difference from the sequence of at least one of SEQ ID NOs: 49-55 and further having at least 97%, at least 98%, at least 99% or at least 99.5% sequence identity with one or more of SEQ ID NOs: 49-55, sequences having at least 98%, at least 98.5%, at least 99%, or at least 99.5% sequence identity to SEQ ID NOs: 49-55, and
[0271] (b) the isolated second Lactobacillus reuteri strain has a genomic nucleic acid sequence including at least one of SEQ ID NOs: 44-48, sequences having one or more nucleic acid sequence difference from the sequence of at least one of SEQ ID NOs: 44-48, sequences having at least one nucleic acid sequence difference from the sequence of at least one of SEQ ID NOs: 44-48 and further having at least 97%, at least 98%, at least 99% or at least 99.5% sequence identity with one or more of SEQ ID NOs: 44-48, sequences having at least 98%, at least 98.5%, at least 99%, or at least 99.5% sequence identity to SEQ ID NOs: 44-48.

[0272] 94. The method of embodiments 89, 90, 91, 92 or 93, wherein
[0273] (a) the isolated first Lactobacillus reuteri strain comprises or has a genomic nucleic acid sequence corresponding to the genomic nucleic acid sequence of ATCC strain PTA-126788, or a variant thereof comprising or having a nucleic acid sequence at least 98%, at least 98.5%, at least 99%, or at least 99.5% sequence identity to the genomic nucleic acid sequence of ATCC strain PTA-126788, and
[0274] (b) the isolated second Lactobacillus reuteri strain comprises or has a genomic nucleic acid sequence corresponding to the genomic nucleic acid sequence of ATCC strain PTA-126787, or a variant thereof comprising or having a nucleic acid sequence at least 98%, at least 98.5%, at least 99%, or at least 99.5% sequence identity to the genomic nucleic acid sequence of ATCC strain PTA-126787.

[0275] 95. The method of any of embodiments 89-94, wherein the isolated first Lactobacillus reuteri strain is Lactobacillus reuteri strain 3632, which corresponds to ATCC Patent Deposit Number PTA-126788 and the isolated second Lactobacillus reuteri is Lactobacillus reuteri strain 3630, which corresponds to ATCC Patent Deposit Number PTA-126787.

[0276] 96. The method of any of embodiments 84-95, wherein the at least one or the two Lactobacillus reuteri strains are administered prior to one or more anti-inflammatory agent, molecule or cytokine or immunomodulatory agent.

[0277] 97. The method of embodiment 96, wherein the one or more an anti-inflammatory agent, molecule or cytokine is selected from one or more anti-inflammatory, nonsteroidal anti-inflammatory drug (NSAID), steroid, biologic, antibiotic, or anti-diarrheal agent.

[0278] 98. The method of embodiment 97, wherein the biologic targets a specific aspect or part of the immune system and acts as an immunosuppressant or neutralizes one or more protein causing inflammation.

[0279] 99. The method of any of embodiments 84-95, further comprising administering an effective amount of a prebiotic.

[0280] 100. The method of embodiment 99, wherein the prebiotic is selected from mannan-oligosaccharides, fructo-oligosaccharides, galacto-oligosaccharides, chito-oligosaccharides, isomalto-oligosaccharides, pectic-oligosaccharides, xylo-oligosaccharides, and lactose-oligosaccharides.

[0281] 101. The method of any of embodiments 37, 46, 67, 78 or 96, wherein the at least one or the two Lactobacillus reuteri strains are administered prior to and in conjunction one or more anti-inflammatory agent, molecule or cytokine or immunomodulatory.

[0282] 102. The method of any of embodiments 37, 46, 67, 78 or 96, wherein the at least one or the two Lactobacillus reuteri strains are administered prior to, in conjunction with, and following one or more anti-inflammatory agent, molecule or cytokine or immunomodulatory.

[0283] 103. The method of any of embodiments 37, 46, 67, 78 or 96, wherein the at least one or the two Lactobacillus reuteri strains are administered in combination with or shortly following one or more anti-inflammatory agent, molecule or cytokine or immunomodulator.

[0284] 104. The method of any of embodiments 37, 46, 67, 78 or 96, wherein one or more anti-inflammatory agent, molecule or cytokine or immunomodulator is administered as a single dose or multiple doses.

[0285] 105. The method of any of embodiments 37, 46, 67, 78 or 96, wherein the at least one or the two Lactobacillus reuteri strains are administered prior to and/or between and/or in combination with multiple doses of one or more anti-inflammatory agent, molecule or cytokine or immunomodulator.

[0286] 106. The method according to any one of embodiments 32-101, wherein the composition comprises a ratio of isolated first Lactobacillus reuteri strain to isolated second Lactobacillus reuteri strain of 0.75-1.5:1.

[0287] 107. The method according to any one of embodiments 32-101, wherein the composition comprises about equal amounts of the isolated first Lactobacillus reuteri strain and the isolated second Lactobacillus reuteri strain.

[0288] 108. The method according to any one of embodiments 32-101, wherein the composition is formulated as animal feed, feed additive, food ingredient, water additive, water-mixed additive, consumable solution, consumable spray additive, consumable solid, consumable gel, injection, or combinations thereof.

[0289] 109. The method according to embodiment 108, wherein the composition comprises animal feed.

[0290] 110. The method according to any of embodiments 32-101, wherein the composition comprises the isolated first Lactobacillus reuteri strain in an amount of about 10²-10⁸ CFU/kg of the composition, about 10⁴-10⁷ CFU/kg of the composition, or about 10³-10⁵ CFU/kg of the composition.

[0291] 111. The method according to any one of embodiments 32-101, wherein the composition comprises isolated second Lactobacillus reuteri strain in an amount of about 10²-10⁸ CFU/kg of the composition, about 10⁴-10⁷ CFU/kg of the composition, or about 10³-10 CFU/kg of the composition.

[0292] 112. The method according to any one of embodiments 32-101 wherein the composition comprises the isolated first Lactobacillus reuteri strain in an amount of about 10 CFU/kg of the composition.

[0293] 113. The method according to any one of embodiments 32-101, wherein the composition comprises isolated second Lactobacillus reuteri strain in an amount of about 10 CFU/kg of the composition.

[0294] 114. The method according to any one of embodiments 32-101, wherein the animal is bird, poultry, a human, or a non-human mammal.

[0295] 115. The composition in accordance with any of embodiments 8-31 or 32-114 wherein the composition is administered orally or by injection.

[0296] 116. The composition in accordance with embodiment 8-31, 32-114 or 115, wherein the composition is administered orally, optionally by food administration or as a food or feed additive.

[0297] 117. The composition in accordance with embodiment 8-31, 32-114 or 115, wherein the composition is administered orally, optionally by direct ingestion in a powder, liquid, emulsion or pill.

[0298] 118. The composition in accordance with any of embodiments 8-31 or 32-114 wherein the composition is administered wherein administered by in ovo administration.

[0299] 119. The composition in accordance with any of embodiments 8-31 or 32-114 wherein the composition is administered by spray administration.

[0300] 120. The method of embodiment 32-114, wherein the animal is a bird, a human, or a non-human mammal.

[0301] 121. The method of embodiment 120, wherein the bird is poultry.

[0302] 122. The method of embodiment 121, wherein the poultry is a chicken.

[0303] 123. The method of embodiment 121, wherein the poultry is an egg-producing chicken.

[0304] 124. The method of embodiment 120, wherein the animal is a farm animal or food production animal.

[0305] 125. The method of embodiment 120, wherein the animal is a human.

[0306] 126. The method of embodiment 120, wherein the animal is a horse, dog or cat.

[0307] 127. The method of any of embodiments 32-114, wherein the animal administered the composition exhibits a shift in the microbiome content of gastrointestinal tract.

[0308] 128. A biosynthetic gene cluster (BGC), particularly a polyketide synthase (PKS) BGC, capable of producing an AhR-activating metabolite.

[0309] 129. The biosynthetic gene cluster (BGC) of embodiment 128, wherein the BGC is an isolated polyketide synthase (PKS) BGC of Lactobacillus reuteri strain 3632 is provided.

[0310] 130. The biosynthetic gene cluster (BGC) of embodiment 128 or 129, wherein the PKS BGC comprises the nucleic acid set out in SEQ ID NO: 77.

[0311] 131. The biosynthetic gene cluster (BGC) of embodiment 128, 129 or 130, wherein the PKS BGC comprises nucleic acid encoding one or more polypeptide selected from SEQ ID NOs: 78-92.

[0312] 132. The biosynthetic gene cluster (BGC) of embodiment 128, 129 or 130, wherein the PKS BGC comprises nucleic acid encoding one or more polypeptide selected from SEQ ID NOs: 78-85 and 87-92.

[0313] 133. The biosynthetic gene cluster (BGC) of embodiment 128, 129 or 130, wherein the PKS BGC comprises nucleic acid encoding the polypeptides SEQ ID NOs: 78-85 and 87-92.

[0314] 134. An Ahr-metabolite synthesizing cluster of genes encoding proteins SEQ ID NO: 78-92.

[0315] 135. An Ahr-metabolite synthesizing cluster of genes encoding proteins SEQ ID NO: 78-85 and SEQ ID NO: 86-92.

[0316] 136. A plasmid comprising nucleic acid encoding one or more polypeptide selected from SEQ ID NOs: 78-92.

[0317] 137. The plasmid of embodiment 123, comprising nucleic acid encoding one or more polypeptide selected from SEQ ID NOs: 78-85 and 87-92.

[0318] 138. The plasmid of embodiment 123, comprising nucleic acid encoding the polypeptides SEQ ID NOs: 78-85 and 87-92.

[0319] 139. The plasmid of any of embodiments 123, 124 or 125, wherein the encoded polypeptides are capable of synthesizing an Ahr-metabolite.

[0320] 140. A plasmid comprising an Ahr-metabolite synthesizing cluster of genes encoding proteins SEQ ID NO: 78-92.

[0321] 141. A plasmid comprising an Ahr-metabolite synthesizing cluster of genes encoding proteins SEQ ID NO: 78-85 and SEQ ID NO: 86-92.

[0322] 142. The cluster of genes or plasmid of any of embodiments 134-141, wherein the Ahr-metabolite is capable of increasing IL-22 levels in the intestine.

[0323] 143. The cluster of genes or plasmid of any of embodiments 134-141, wherein the Ahr-metabolite is capable of ameliorating or reducing intestinal inflammation.

[0324] 144. The cluster of genes or plasmid of any of embodiments 134-141, wherein the Ahr-metabolite is relevant for and capable of maintaining intestinal barrier integrity.

[0325] 145. The cluster of genes or plasmid of any of embodiments 134-141, wherein the Ahr-metabolite is relevant for and capable of reducing or alleviating increased intestinal permeability.

[0326] 146. A method for expressing or producing an Ahr-metabolite via controlled expression of the PKS gene cluster encoding proteins SEQ ID NO:78-85 and 87-92.

[0327] 147. A method for expressing or producing an Ahr-metabolite via controlled expression of the PKS gene cluster encoding proteins SEQ ID NO:78-92.

[0328] 148. A method for expressing or producing an Ahr-metabolite via inducible expression of the PKS gene cluster encoding proteins SEQ ID NO:78-85 and 87-92.

[0329] 149. A method for expressing or producing an Ahr-metabolite via inducible expression of the PKS gene cluster encoding proteins SEQ ID NO:78-92.

[0330] 150. The method of any of embodiments 146-149, wherein the Ahr-metabolite is expressed or produced in Lactobacillus reuteri bacteria.

[0331] The present disclosure may be better understood with reference to the examples, set forth below. The following examples are put forth so as to provide those of ordinary skill in the art with a complete disclosure and description of how the compounds, compositions, and/or methods claimed herein are made, evaluated and conducted, and are intended to be purely exemplary and are not intended to limit the disclosure. It is appreciated that other embodiments and uses are apparent to those skilled in the art and that the invention is not limited to these specific illustrative examples or preferred embodiments.

### Example 1

### Isolation and Characterization of L. reuteri 3630 and 3632

[0332] L. reuteri 3630 and 3632 were isolated from chicken cecum. Morphology of these strains include opaque, circular colonies with slight whitish center. The LR 3630 colonies have whitish pigmentation and the LR 3632 colonies include dull orange pigmentation. These strains are non-spore forming

[0333] The strains are sequenced by PacBio sequencing. 3632 contained 7 contigs and yield a total estimated genome size of 2.4 Mb and LR 3630 contained 5 contigs yielding an estimated genome size of 2.4 Mb. Phylogenetic relationships of the genomes are explored with UBCG v3.0 using default settings. This software tool employs a set of 92 single-copy core genes commonly present in all bacterial genomes. These genes then are aligned and concatenated within UBCG using default parameters. The estimation of robustness of the nodes is done through the gene support index (GSI), defined as the number of individual gene trees, out of the total genes used, that present the same node. A maximum-likelihood phylogenetic tree is inferred using FastTree v.2.1.10 with the GTR+CAT model. LR strains 3632 and 3630 isolates show closest relationship to L. reuteri.

### Example 2

### Antiviral Effect of L. reuteri on Porcine Reproductive and Respiratory Syndrome (PRRSV)

[0334] The effect of LR cells and LR supernatant (3630 and 3632) are tested on MARC-145 (Monkey Kidney) cells in a prevention and therapeutic context, in connection with PRRSV. Virus: GFP-PRRSV, MOI of 1.0; Bacteria: Stock (10⁶ cells/mL).

[0335] MARC-145 cells are prepared 2-3 days prior to study. The cells are treated with undiluted and 2-fold serially diluted Bacteria/extract up to 1:32 (1:64) before or after PRRSV infection. In a prevention context, Lactobacillus cells or culture supernatant are added first and virus is added 2-4 hrs later. In a therapeutic context, virus is added first and Lactobacillus cells or culture supernatant is added next, 10 min or 1 hr post infection. The PRRSV inhibitory effect is analyzed by GFP expression and CPE up to 72 hpi.

[0336] Both live Lactobacillus reuteri cells show more than 50% inhibitory effect on PRRSV at 1:16 to 1:32 dilutions in prevention setting. Similar inhibition (30-40%) was shown for both Lactobacillus reuteri supernatants in prevention setting. Both live Lactobacillus reuteri cells less efficiently inhibited PRRSV but both supernatants more efficiently inhibited virus replication in therapeutic setting (data not shown).

### Example 3

### In Silico, In Vitro and In Vivo Safety Evaluation of Limosilactobacillus reuteri Strains for Potential Probiotic Applications

[0337] The last two decades have witnessed a tremendous growth in probiotics and in the numbers of publications on their potential health benefits. Owing to their distinguishing beneficial effects and long history of safe use, species belonging to the Lactobacillus genus are among the most widely used probiotic species in human food and dietary supplements and are finding increased use in animal feed. Here, we isolated, identified, and evaluated the safety of two novel Lactobacillus reuteri (L. reuteri) isolates, ATCC PTA-126787 & ATCC PTA-126788. More specifically, we sequenced the genomes of these two L. reuteri strains using the PacBio sequencing platform. Using a combination of biochemical and genetic methods, we identified the two strains as belonging to L. reuteri species.

[0338] Detailed in silico analyses showed that the two strains do not encode for any known genetic sequences of concern for human or animal health. In vitro assays confirmed that the strains are susceptible to clinically relevant antibiotics and do not produce potentially harmful by-products such as biogenic amines. In vitro bile and acid tolerance studies demonstrated that the two strains have similar survival profiles as the commercial L. reuteri probiotic strain DSM 17938. Most importantly, daily administration of the two probiotic strains to broiler chickens in drinking water for 26 days did not induce any adverse effect, clinical disease, or histopathological lesions, supporting the safety of the strains in an in vivo avian model. All together, these data provide in silico, in vitro and in vivo evidence of the safety of the two novel candidates for potential probiotic applications in humans as well as animals.

[0339] The term “probiotic” was derived from “pro” (Latin, means “for”) and “bios” (Greek, means “life”) and thereby means “for life”. Probiotics are defined as “live microorganisms that, when administered in adequate amounts, confer a benefit on the host” (1). In recent years, there has been an unprecedented growth in the application of probiotics to support health and well-being. Often consumed as dietary supplements, nutraceuticals or as part of functional foods, probiotics are associated with many health benefits in the form of promoting gut barrier function, including studies on their potential to prevent and/or treat gastrointestinal diseases, inhibit pathogenic bacteria, and favourably modulate gut bacteria, the immune system, and host metabolism (2-5). Several species of microorganisms are used as probiotics and the lactic acid bacteria belonging to the Lactobacillus genus, first described in 1901 (6), are among the most commonly used and well-studied probiotic bacteria with a long history of safe use (7).

[0340] Limosilactobacillus reuteri (L. reuteri), a member of the Lactobacillus genus, are Gram positive, non-spore forming, non-motile bacteria, which are naturally adapted to survive under low pH, bile-rich, and microaerophilic to strictly anaerobic gastrointestinal environments (8). German microbiologist Gerhard Reuter first isolated L. reuteri from human fecal and intestinal samples and classified it as L. fermentum biotype II (9); later, Kandler et al., (1980) identified L. reuteri as a distinct species (10). L. reuteri is considered one of the few true autochthonous lactobacilli present frequently in the gastrointestinal tract of all vertebrates, including humans, monkeys, chicken, turkeys, doves, pigs, dogs, lambs, cattle and rodents (11, 12). L. reuteri strains are often known to produce reuterin (a bacteriocin with antimicrobial properties), cobalamin and folate, exclude or inhibit pathogens, modulate immune response, and enhance gut barrier function (13-17). Several clinical studies have been published on the efficacy of L. reuteri in treating gastrointestinal disorders such as infantile colic, regurgitation, functional constipation, abdominal pain, and necrotizing enterocolitis (17-22). L. reuteri was used in sourdough bread in 1980, and was introduced into human functional foods as a starter in the production of a special drink called “BRA (stands for Bifidobacterium, reuteri and Acidophilus)” and a fermented milk called “BRA fil” in 1991 in Sweden (23). Since then, L. reuteri strains, such as DSM 17938 and RC-14, have been widely used as a part of many commercially available dietary supplements and functional foods (17).

[0341] Lactic acid bacteria are known for their safety and are one of the probiotic microbial types with the longest history of safe use (7). The L. reuteri species is usually considered safe for human and animal consumption due to the facts that they have been used as part of fermented foods for more than 30 years, they are normal inhabitants of the human and animal gut microflora, and they have regulatory stature in the United States and the European Union. Indeed, several strains belonging to the L. reuteri species were notified to the United States Food and Drug Administration (FDA), including three strains as “Generally Regarded As Safe (GRAS)” for use in specific foods and two strains as new dietary ingredients; the FDA cited no objections to such strains (24-28). Moreover the L. reuteri species was granted “Qualified Presumption of Safety (QPS)” status and is considered safe for use in, or as a source of food for, human and animal consumption by European Food Safety Agency (EFSA) (24-26, 29, 30). A growing number of clinical studies have repeatedly confirmed the safety of L. reuteri not only in healthy individuals but also in immunocompromised individuals such as those positive for HIV (31, 32).

[0342] Despite the prior safe use of a probiotic genus and species, the survival properties, efficacy, and safety of probiotics are evaluated on a strain-specific basis. Hence, screening for such properties for every new strain is required before any new probiotic candidate is accepted for human and animal consumption. Hence, various regulatory agencies and experts have established comprehensive recommended guidelines for efficacy and safety assessment of new probiotic candidates (33-35). These guidelines encompass a series of in vitro, in silico and in vivo studies, of which genomics is considered a powerful tool for rapid screening of probiotic candidates for safety.

[0343] Genomic characterizations are instrumental in selecting a safe and efficacious probiotic strain. Safety assessment begins with the correct identification of the probiotic candidate and this is important for both scientific and regulatory reasons. Genomic approaches offer high resolution identification of strains by comparing those with other well-characterized, safe, and efficacious probiotic strains. Comparative genomics studies further help to understand the molecular basis of probiotic efficacy, as well as the survival and adaptation of these probiotic strains in the gastrointestinal tract. Most importantly, genomic analyses allow for rapid screening of probiotic candidates for genes encoding antimicrobial resistance, virulence factors, toxins, and biogenic amines, facilitating better understanding of the safety of the probiotic strain of interest. Finally, genome-based analyses also help to investigate the stability of probiotic strains.

[0344] The goal of this study was to provide in silico, in vitro and in vivo evidence to support the safety of L. reuteri ATCC PTA-126787 & ATCC PTA-126788 (hereafter referred to as PTA-126787 and PTA-126788) for their use as probiotics in humans as well as animals. More specifically, the strains were identified using a combination of biochemical, 16S rRNA and whole-genome sequencing analyses. The genomes were screened for potential genes encoding antimicrobial resistance, toxins, virulence factors and other harmful metabolites. In silico data were further confirmed using in vitro experiments. The strains were finally analyzed for safety using the broiler chicken as an in vivo model.

### Materials and Methods

### Bacterial Strains and Culture Conditions

[0345] The L. reuteri strains described in this study were routinely propagated on Lactobacilli de Man Rogosa Sharpe (MRS, BD Difco) medium anaerobically at 37° C. L. reuteri strain DSM 17938 was used as a reference strain for biochemical identification, D- and L-lactate production, autoaggregation, resistance to bile salts and acidic pH assays. L. reuteri strain ATCC 23272 was used as a reference strain for growth kinetics, autoaggregation, biogenic amine production and D- and L-lactate production assays. L. acidophilus strain ATCC 4356 was used as a reference strain for growth kinetics assay.

### Molecular Identification

[0346] The strains were identified using 16S rRNA sequencing. Briefly, L. reuteri strains were grown in Lactobacilli MRS broth overnight for 14-16 hours under anaerobic conditions at 37° C. One hundred microliters of the culture was pelleted by centrifugation and resuspended in 50 μL of nuclease-free water. The resuspended culture was heated at 98° C. for 10 minutes. The debris were pelleted by brief centrifugation and the supernatant was used as a template for PCR. The 16S rRNA gene was amplified by PCR using 3 μL of the DNA template and universal primers 16S rRNA gene F, 5′-AGAGTTTGATCCTGGCTCAG-3′ (SEQ ID NO:56) and 16S rRNA gene R, 5′-CTTGTGCGGGCCCCCGTCAATTC-3′ (SEQ ID NO:57). The amplicons were PCR purified using the QIAquick PCR Purification Kit (Qiagen Inc.) following manufacturer's instructions and sequenced by Sanger sequencing by GenScript. The sequences were then searched against the NCBI nucleotide collection (nr/nt) database using the BLAST algorithm.

### Biochemical Identification

[0347] The strains were profiled for enzymatic activity and carbohydrate fermentation using API 50 CHL strips (bioMdrieux), following the manufacturer's instructions. The L. reuteri strain DSM 17938 was used as a positive control.

### Enzyme Profiling

[0348] The enzymatic profiles of L. reuteri strains were determined using the APIZym test strips (bioMdrieux), following manufacturer's instructions.

### Growth Kinetics

[0349] The L. reuteri strains were grown in MRS broth overnight for 14-16 hours under anaerobic conditions at 37° C. The next morning, the cultures were adjusted to an OD600 of 0.1 and monitored for growth by plating on Lactobacilli MRS agar at 0, 1, 2, 4 and 8 hours. Human L. reuteri strain 23272 and L. acidophilus strain ATCC 4356 were used as controls.

### Isolation of High Molecular Weight DNA

[0350] High molecular weight DNA for PacBio sequencing was isolated using the phenol:chloroform method. Briefly, L. reuteri strains were grown in Lactobacilli MRS broth overnight under anaerobic conditions for 14-16 hours without shaking. The cells were pelleted by centrifugation at 4,000 g RCF for 10 minutes at 4° C. The pellet was washed once in 1 mL of TE buffer (10 mM Tris-HCl and 1 mM EDTA, pH 8.0) and resuspended in 0.5 mL of TE containing 1.2% Triton X-100 and 10 mg/mL of lysozyme (Sigma Aldrich) and incubated at 37° C. for 1 hour. After incubation, 20 μL of proteinase K was added, mixed several times, and incubated at 55° C. for 1 hour. Twenty microliters of RNase was then added and incubated at 37° C. for an additional 30 minutes. Approximately, 600 μL of phenol:chloroform:isoamyl alcohol (25:24:1; ThermoFisher Scientific) mixture (pH 8.0) was added, the tubes were inverted several times and centrifuged at 10,000 rpm for 10 minutes at 4° C. The upper aqueous phase was carefully transferred to a new 1.5 mL centrifuge tube. The above phenol:chloroform step was repeated one more time. An equal volume of chloroform was added, the tubes were inverted several times and centrifuged at 10,000 rpm for 10 minutes. The upper aqueous phase was carefully transferred to a new centrifuge tube. An equal volume of isopropanol was layered onto the aqueous phase containing genomic DNA and the tubes were gently shaken to precipitate high molecular weight genomic DNA. The precipitated DNA was removed with a sterile loop and transferred to a new tube containing 1 mL 70% ethanol. The tubes were centrifuged at 10,000 rpm for 5 minutes at 4° C. The DNA pellet was briefly air-dried and 300 μL of nuclease free water was added, and then allowed to dissolve overnight at 4° C. The dissolved DNA was gently mixed with a big-bore tip and stored at −20° C. The isolated DNA was analyzed for quantity using Qubit.

### Whole Genome Sequencing and Assembly

[0351] The bacterial genomic DNA samples were shipped on dry-ice to DNA Link, Inc (San Diego, CA) for whole genome sequencing using PacBio RSII platform. Briefly, 20 kb DNA fragments were generated by shearing genomic DNA using the Covaris G-tube according to the manufacturer's recommended protocol (Covaris). Smaller fragments were purified by the AMpureXP bead purification system (Beckman Coulter). For library preparation, 5 μg of genomic DNA was used. The SMRTbell library was constructed using SMRTbell™ Template Prep Kit 1.0 (PacBio®). Small fragments were removed using the BluePippin Size selection system (Sage Science). The remaining DNA sample was used for large-insert library preparation. A sequencing primer was annealed to the SMRTbell template and DNA polymerase was bound to the complex using DNA/Polymerase Binding kit P6 (PacBio®). Following the polymerase binding reaction, the MagBead was bound to the library complex with MagBeads Kit (PacBio®). This polymerase-SMRTbell-adaptor complex was loaded into zero-mode waveguides. The SMRTbell library was sequenced by 2 PacBio® SMRT cells (PacBio®) using the DNA sequencing kit 4.0 with C4 chemistry (PacBio®). A 1×240-minute movie was captured for each SMRT cell using the PacBio® RS sequencing platform. The genome was further assembled by DNA link, Inc with HGAP.3 protocol.

### Genome Annotation and Feature Prediction

[0352] Genome annotation was carried out using a custom annotation pipeline by combining several prediction tools. Coding sequences, transfer RNA and transmembrane RNA were predicted and annotated using Prokka v 1.14.5 (36-38). Ribosomal binding site (RBS) prediction was carried out using RBSFinder (39). TranstermHP v2.08 was used to predict Rho-independent transcription terminators (TTS) (40). Ribosomal RNA and other functional RNAs such as riboswitches and non-coding RNA was annotated with Infernal v1.1.2 (41). Operons were predicted based on primary genome sequence information with Rockhopper v2.0.3 using default parameters (42).

### Data Deposition

[0353] The raw sequencing reads, genome assemblies and annotations in this study were deposited in the NCBI BioProject under project PRJNA675717.

Accession numbers:

| SerialNo | Sample | BioSample | Accession number | SRA number |
|---|---|---|---|---|
| 1. | ATCC PTA-126787 | SAMN16712075 | CP065330-CP065334 | SRX9689306 |
| 2. | ATCC PTA-126788 | SAMN16712076 | CP065849-CP065855 | SRX9689307 |

### Phylogenetic Analysis

[0354] Phylogenetic relationships of the genomes were explored with UBCG v3.0 using default settings (43). This software tool employs a set of 92 single-copy core genes commonly present in all bacterial genomes. These genes then were aligned and concatenated within UBCG using default parameters. The estimation of robustness of the nodes is done through the gene support index (GSI), defined as the number of individual gene trees, out of the total genes used, that present the same node. A maximum-likelihood phylogenetic tree was inferred using FastTree v.2.1.10 with the GTR+CAT model (44).

### Comparative Genomic Analysis

[0355] OrthoFinder v2.3.11(45) was used to determine orthologous relationships between protein sequences inferred from PTA-126787 and PTA-126788 with protein sequences of strains ATCC 53608, CF48-3A, DSM20016 and SD2112 (the parent strain of DSM17938) downloaded from GenBank (46). Pairwise Average Nucleotide Identities (ANI) values were calculated all-against-all, using FastANI v 1.32 (47).

### Identification of Prophages, Transposases and Other Insertion Sequences

[0356] Insertion sequence prediction was done using ISEscan v.1.7.2.1 (48). Prophage prediction was done using PhiSpy v4.2.6 which combines similarity- and composition-based strategies (49).

### Identification of CRISPR-Cas Sequences

[0357] Coding sequences for Clustered Regularly Interspaced Short Palindromic Repeats (CRISPR) and CRISPR-associated genes (Cas) were searched using CRISPRDetect version 2.2 (50). However, no CRISPR sequences were identified in both the genomes.

### Identification of Virulence Determinants and Antimicrobial Resistance Genes

[0358] Protein-encoding genes related to virulence were searched manually based on functional annotation of the genomes. Automated screening of whole genome sequences of both strains against the Virulence Factor Database (VFDB), a comprehensive repository of known bacterial virulence factors and other putative adverse metabolites (51), ARG-ANNOT (52), ResFinder (53) and NCBI-AMR databases (2020 Jun. 15) was performed using Abricate version 0.9.9 (54).

### Identification of Genes Encoding Toxic Metabolites

[0359] Analysis was performed on the genomes manually to identify homologs of histidine decarboxylase, tyrosine decarboxylase, lysine decarboxylase, ornithine decarboxylase, agmatine deiminase, agmatine::putrescine antiporter, multicopper oxidase and other potential genes involved in the production of biogenic amines.

### Genes Involved in Lactic Acid Production and Other Beneficial Metabolites

[0360] Sequences encoding putative genes involved in lactic acid production and other metabolites were identified by manual search of functional annotations.

### Antimicrobial Susceptibility Profiling

[0361] Antimicrobial susceptibility testing was performed using broth microdilution method, using LSB medium (Mueller Hinton broth containing 5% horse blood) following Clinical and Laboratory Standards Institute (CLSI, 28th edition) guidelines. Two-fold dilutions of the clinically relevant antibiotics (Clindamycin, Chloramphenicol, Erythromycin, Gentamicin, Kanamycin, Streptomycin, Tetracycline and Ampicillin, all purchased from Sigma Aldrich) were prepared in LSB medium. Approximately, 50 μL of 1×105 CFUs/mL of the L. reuteri cells were added into each well. “No antibiotic” and “medium” alone controls were included. Escherichia coli ATCC 25923, Pseudomonas aeruginosa ATCC 27853, Staphylococcus aureus ATCC 29213, Enterococcus faecalis ATCC 29212, Streptococcus pneumonia ATCC 49619 and Lacticaseibacillus paracasei ATCC 334 were used as quality control organisms. The plates were incubated for 24-48 hours under microaerophilic conditions. Minimum inhibitory concentration (MIC) was defined as the lowest concentration of antibiotic that showed complete inhibition of L. reuteri growth. The strains were classified as susceptible or resistant using the microbiological cut offs established by EFSA (35).

### Biogenic Amine Production

[0362] The ability of L. reuteri strains to produce biogenic amines was determined as previously described (55). Briefly, L. reuteri cultures were grown in MRS broth supplemented with L-tyrosine (0.1% m/v), L-histidine (0.1% m/v), L-arginine (0.1% m/v) or L-lysine (0.1% m/v) and pyridoxal-5-phosphate (0.005% m/v) under anaerobic conditions at 37° C. overnight. The cultures were then plated on supplemented decarboxylase broth base as described by Bover-Cid and Holzapfel (56) and colour development was recorded after 48 hours of incubation under anaerobic conditions at 37° C.

### D- and L-Lactate Production

[0363] The amounts of D- and L-lactate produced were quantified using D-/L-Lactic Acid (D-/L-Lactate) (Rapid) Assay Kit (Megazyme), following manufacturer's instructions. Briefly, L. reuteri strains were grown in MRS broth at 37° C. under anaerobic conditions for 14-16 hours. The cultures were adjusted to OD600 of 1.5 and centrifuged at 4,000 g RCF for 10 minutes at 4° C. The supernatant was filter sterilized and used for lactic acid quantification as—described in the manual provided by the manufacturer.

### Autoaggregation

[0364] The ability of L. reuteri strains to autoaggregate was assayed as follows. L. reuteri strains were grown in MRS broth overnight for 14-16 hours under anaerobic conditions at 37° C. without shaking. The cultures were adjusted to an OD600 of 0.1 and allowed to grow for another 14-16 hours and observed for aggregate formation. Autoaggregation was quantified as described previously with some minor modifications (57). L. reuteri strains were grown in MRS broth overnight for 14-16 hours under anaerobic conditions at 37° C. without shaking. The cultures were washed twice with PBS (pH 7.2) by centrifuging at 10,000 rpm for 10 minutes at 4° C. The washed cell pellets were then resuspended in PBS (pH 7.2) and adjusted to an OD600 of 0.5 to standardize the number of bacterial cells (107 to 108). The suspensions were incubated as 1-ml aliquots under anaerobic conditions at 37° C. for 5 hours. The OD600 was recorded after 5 hours. Autoaggregation percentage was calculated as follows: [1−(Absorbance at 5 hours/Absorbance at 0 hour)]×100.

### Hydrogen Peroxide Production

[0365] The ability of L. reuteri strains to produce hydrogen peroxide was assessed as previously described (58). Briefly, MRS agar plates were prepared with 0.25 mg/mL of tetramethylbenzidine and 0.01 mg/mL of horseradish peroxidase. L. reuteri strains were streaked on the supplemented MRS agar plates and incubated for 24 hours and coloration of the colonies/culture was recorded. White bacterial colonies/culture indicates no hydrogen peroxide production, pale blue colonies/culture indicates poor production and dark blue colonies/culture indicates high production.

### Resistance to Bile Salts

[0366] The ability of cultures to tolerate bile salts was determined as follows: L. reuteri strains were grown under anaerobic conditions for 14-16 hours at 37° C. without shaking. The culture was inoculated into fresh MRS broth (pH adjusted to 6.4) containing 0.3% bile salts (Oxoid, USA) at a rate of 1% inoculum and incubated under anaerobic conditions at 37° C. for 4 hours. Samples were collected at 0 hours and 4 hours after incubation and analysed for CFU counts.

### Resistance to Acidic pH

[0367] The tolerance of L. reuteri strains to low pH was determined as described below. L. reuteri strains were grown under anaerobic conditions for 14-16 hours at 37° C. without shaking. The cells were harvested by centrifugation at 4,000 g RCF for 10 minutes at 4° C. and the pellet was resuspended to an OD600 of 0.5 in sterile PBS adjusted to a pH of 2.5. The cultures were then incubated at 37° C. for 3 hours under anaerobic conditions. Aliquots of samples were collected at time 0 hours and 3 hours after incubation, serially diluted in PBS and plated on MRS to determine the CFU counts.

### In Vivo Safety Assessments

[0368] The safety of L. reuteri strains was tested using Specific Pathogen Free (SPF) chickens. Forty-two (Three groups, 14 chicks per group) day-old, White Leghorn, mixed sex chicks were purchased from Valo BioMedia. At arrival, the chicks were tagged via wing web. The birds were fed commercially available non-medicated feed ad libitum. Briefly, day-old chicks were randomly grouped into three groups with 14 birds in each group. Group 1 was administered with 1×107 CFUs/bird/day of L. reuteri PTA-126787 in drinking water from day 1 to day 26. Group 2 was administered with 1×107 CFUs/bird/day of L. reuteri PTA-126788 in drinking water from day 1 to day 26. Group 3 served as no treatment control. The birds were examined for adverse events, morbidity, and mortality on a daily basis. On day 31, the birds were euthanized, and observed for any gross lesions, indicative of health issues. More specifically, lungs, trachea, liver, spleen, kidneys, intestine were observed for gross lesions and scored as normal or abnormal. Gut (2 cm of cecal-rectal junction), lung (dime size) and tracheal (2 cm long) samples were collected from 5 birds per group in buffered formalin, analysed for histopathology and scored as described in TABLE 1.

TABLE 1
Histopathological Scoring Criteria

| | |
|---|---|
| TRACHEA | Cilia: 4 = complete deciliation, 3 = marked deciliation [75%], |
| | 2 = moderate deciliation [50-75%], 1 = patchy deciliation[<50%], |
| | 0 = NSF); |
| | Epithelium (4 = severe necrosis/sloughing or squamous |
| | metaplasia, 3 = marked necrosis with segmental |
| | sloughing/erosion, 2 = moderate necrosis, 1 = mild necrosis, |
| | 0 = NSF) |
| | Mucosa: 4 = marked/diffuse nodular lymphoid hyperplasia |
| | [4+/lpf] with marked hyperplasia of mucus glands OR complete |
| | destruction of mucus glands, 3 = moderate nodular lymphoid |
| | hyperplasia [3-4/lpf] and moderate hyperplasia of mucus |
| | glands, 2 = mild nodular lymphoid hyperplasia [1-2/lpf] with mild |
| | mucus gland hyperplasia, 1 = mild lymphoid infiltrates/no |
| | nodules, 0 = NSF) |
| | Inflammation: 4 = diffuse, marked heterophilic infiltration in |
| | lamina propria with margination of cells; 3 = focally extensive, |
| | moderate heterophilic infiltration in lamina propria with some |
| | margination, 2 = moderate (35-50%) heterophilic inflammation, |
| | 1 = mild (<35%) heterophilic infiltration, 0 = NSF) |
| LUNG | Parabronchi: 4 = diffuse hyperplastic parabronchitis with 5+ |
| | lymphoid nodular aggregates and heterophilic infiltrates and |
| | marked edema, 3 = focally extensive hyperplastic parabronchitis |
| | with 3-5 nodular aggregates and mild heterophilic infiltrates |
| | and edema, 2 = focal parabronchitis with <3 nodular aggreagtes |
| | and mild edema, 1 = mild lymphocytic infiltrates in lamina |
| | propria OR mild edema, 0 = NSF |
| CECAL | 4 = marked/diffuse nodular lymphoid hyperplasia [4+/lpf] with |
| TONSILS | marked hyperplasia of mucus glands, 3 = moderate nodular |
| | lymphoid hyperplasia [3-4/lpf] and moderate hyperplasia of |
| | mucus glands, 2 = mild nodular lymphoid hyperplasia [1-2/lpf] |
| | with mild mucus gland hyperplasia, 1 = mild lymphoid |
| | infiltrates/no nodules, 0 = NSF |

### Results

L. reuteri Isolation and Molecular Identification

[0369] A library of seven L. reuteri strains along with the two strains described in this study were isolated from the cecum of older broiler chickens at Elanco Animal Health, Cuxhaven, (Germany). Based on the 16S rRNA amplicon sequencing and respective BLAST search comparison results, all the seven strains, including PTA-126787 and PTA-126788 showed closest homology to published L. reuteri sequences, suggesting that our strains belong to the L. reuteri species (FIG. 1).

### Biochemical Identification

[0370] When tested with API 50 CHL, the final two L. reuteri candidates, PTA-126787 and PTA-126788, were identified as Limosilactobacillus fermentum (previously Lactobacillus fermentum) with 92.3% identity. The positive control L. reuteri DSM 17938 was also identified as L. fermentum with 92.3% identity. The fermentation profile of L. reuteri is similar to that of L. fermentum and the APIweb™ software version 5.0 does not have the capability to distinguish between the 2 species. The carbohydrate fermentation profile of PTA-126787 and PTA-126788 are depicted in TABLE 2 and compared with the control DSM 17938 strain.

TABLE 2
Carbohydrate fermentation profile of L. reuteri
strains PTA-126787 and PTA-126788 by API 50 CHL

| | PTA- | PTA- | DSM | | PTA- | PTA- | DSM |
|---|---|---|---|---|---|---|---|
| Substrate | 126787 | 126788 | 17938 | Substrate | 126787 | 126788 | 17938 |
| Negative control | − | − | − | Esculin ferric | + | + | + |
| | | | | citrate | | | |
| Glycerol | − | − | − | Salicin | − | − | − |
| Erythritol | − | − | − | D-Cellobiose | − | − | − |
| D-Arabinose | − | − | − | D-Maltose | + | + | + |
| L-Arabinose | + | + | + | D-Lactose | + | + | + |
| D-Ribose | + | + | + | D-Melibiose | + | + | + |
| D-Xylose | − | − | − | D-Saccharose | + | + | + |
| L-Xylose | − | − | − | D-Trehalose | − | − | − |
| D-Adonitol | − | − | − | Inulin | − | − | − |
| Methyl-βD- | − | − | − | D-Melezitose | − | − | − |
| xylopyranoside | | | | | | | |
| D-Galactose | + | + | + | D-Raffinose | + | + | + |
| D-Glucose | + | + | + | Amidon | − | − | − |
| D-Fructose | − | − | − | Glycogen | − | − | − |
| D-Mannose | − | − | − | Xylitol | − | − | − |
| L-Sorbose | − | − | − | Gentibiose | − | − | − |
| L-Rhamnose | − | − | − | D-Turanose | − | − | − |
| Dulcitol | − | − | − | D-Lyxose | − | − | − |
| Inositol | − | − | − | D-Tagatose | − | − | − |
| D-Mannitol | − | − | − | D-Fucose | − | − | − |
| D-Sorbitol | − | − | − | L-Fucose | − | − | − |
| Methyl-αD- | − | − | − | D-Arabitol | − | − | − |
| mannopyroside | | | | | | | |
| Methyl-αD- | − | − | − | L-Arabitol | − | − | − |
| glucopyranoside | | | | | | | |
| N- | − | − | − | Potassium | + | + | + |
| Acetylglucosamine | | | | gluconate | | | |
| Amygdalin | − | − | − | Potassium 2- | − | − | − |
| | | | | ketogluconate | | | |
| Arbutin | − | − | − | Potassium 5- | − | − | − |
| | | | | ketogluconate | | | |

+, positive reaction;
−, negative reaction

### Enzyme Profile

[0371] Enzyme profile is a good indicator of both the probiotic function as well as safety. APIZym test is a apid semiquantitative assay to detect 19 enzymatic reactions. Unlike API 50 CHL, no databases exist to identify bacteria based on APIZym profiles. As shown in TABLE 3, both L. reuteri strains showed similar enzyme profiles. Both strains showed strong leucine arylamidase, valine arylamidase, acid phosphatase, α-galactosidase and β-galactosidase activities, while the two strains were negative for alkaline phosphatase, lipase, trypsin, α-chymotrypsin, β-glucosidase, α-mannosidase and α-fucosidase activities. In general, the enzymatic reactions from APIZym testing were in good agreement with carbohydrate fermentation by API 50 CHL.

TABLE 3
Enzymatic profiles of L. reuteri strains
PTA-126787 and PTA-126788 by APIZym.

| | | PTA- | PTA- |
|---|---|---|---|
| Enzyme assayed | Substrate | 126787 | 126788 |
| Alkaline phosphatase | 2-naphthyl phosphate | − | − |
| Esterase (C 4) | 2-naphthyl butyrate | + | + |
| Esterase Lipase (C 8) | 2-naphthyl capylate | +/− | +/− |
| Lipase (C 14) | 2-naphthyl myristate | − | − |
| Leucine arylamidase | L-leucyl-2-naphthylamide | +++ | +++ |
| Valine arylamidase | L-valyl-2-naphthylamide | ++ | ++ |
| Cystine arylamidase | L-cystyl-2-naphthylamide | + | + |
| Trypsin | N-benzoyl-DL-argine-2- | − | − |
| | naphthylamide | | |
| α-chymotrypsin | N-glutaryl-phenylalanine-2- | − | − |
| | naphthylamide | | |
| Acid phosphatase | 2-naphthyl phosphate | +++ | +++ |
| Naphthol-AS BI- | Naphthol-AS-BI-phosphate | + | + |
| phosphohydrolase α- | 6-Br-2-naphthyl-αD- | +++ | +++ |
| galactosidase | galactopyranoside | | |
| β-galactosidase | 2-naphthyl-βD- | +++ | +++ |
| | galactopyranoside | | |
| β-glucuronidase | Naphthol-AS-BI-βD- | + | + |
| | glucuronide | | |
| α-glucosidase | 2-naphthyl-αD- | + | + |
| | glucopyranoside | | |
| β-glucosidase | 6-Br-2-naphthyl-βD- | − | − |
| | glucopyranoside | | |
| N-acetyl-β- | 1-naphthyl-N-acetyl-βD- | +/− | +/− |
| | glucosaminide | | |
| glucosaminidase α- | 6-Br-2-naphthyl-αD- | − | − |
| mannosidase | mannopyranoside | | |
| α-fucosidase | 2-naphthyl-αL- | − | − |
| | fucopyranoside | | |

+, positive enzymatic reaction;
−, negative enzymatic reaction

### Growth Profiles

[0372] All the L. reuteri strains had similar growth profiles, including PTA-126787 and PTA-126788, and the profiles were comparable to that of human L. reuteri strain ATCC 23272 and Lactobacillus acidophilus strain ATCC 4356 (FIG. 2).

### In Silico Analyses

### A. Genomic Characterization

[0373] The genomes of L. reuteri strains PTA-126787 and PTA-126788 were sequenced by PacBio sequencing platform. Strain PTA-126787 (L. reuteri strain 3630) contains 5 contigs yielding a total estimated genome size of 2.4 Mb. The PTA-126787 (L. reuteri strain 3630) genome contigs nucleic acid sequences are provided in SEQ ID NO:44 through SEQ ID NO:48. Strain PTA-126788 (L. reuteri strain 3630) contains 7 contigs yielding an estimated genome size of 2.4 Mb. The PTA-126788 (L. reuteri strain 3632) genome contigs nucleic acid sequences are provided in SEQ ID NO:49 through SEQ ID NO:55. The genome properties, prediction and annotation of different features are summarized in TABLE 4. The whole-genome sequencing project was deposited at DDBJ/ENA/GenBank under BioProject number PRJNA675717. Accession numbers:
[0374] 1. ATCC PTA-126787 SAMN16712075 CP065330-CP065334
[0375] 2. ATCC PTA-126788 SAMN16712076 CP065849-CP065855

TABLE 4
Genomic properties of L. reuteri
strains PTA-126787 and PTA-126788.

| Feature | PTA-126787 | PTA-126788 |
|---|---|---|
| Contigs | 5 (SEQ ID | 7 (SEQ ID |
| | NO: 44-48) | NO: 49-55) |
| Coding sequence | 2427 | 2495 |
| Prophages | 6 | 8 |
| Mobile Element | 86 | 88 |
| Non-coding RNA | 21 | 17 |
| Operons | 501 | 541 |
| Ribosomal RNA | 18 | 17 |
| Ribosomal binding site | 2359 | 2396 |
| Transcription terminator | 1182 | 1241 |
| Riboswitch | 26 | 25 |
| Transfer RNA | 73 | 74 |
| Transfer-messenger RNA | 1 | 1 |

### B. Phylogenetic Analysis

[0376] Phylogenetic relationships of the genomes were explored with UBCG v3.0 which employs a set of 92 single-copy core genes commonly present in all bacterial genomes. These genes then were aligned and concatenated within UBCG using default parameters. The estimation of robustness of the nodes is done through the gene support index (GSI), defined as the number of individual gene trees, out of the total genes used, that present the same node. As shown in FIG. 3, both strains PTA-126787 and PTA-126788 showed closest relationship to L. reuteri. Average Nucleotide Identities were calculated between closely related genomes and is shown in TABLE 5.

TABLE 5
Average Nucleotide Identity (ANI) of L. reuteri PTA-126787
and PTA-126788 with closely related human probiotic strains.

| Query | Reference | | Orthologous | Sequence |
|---|---|---|---|---|
| genome | genome | % ANI | matches | fragments |
| PTA-126787 | CF48-3A | 98.137 | 560 | 797 |
| PTA-126787 | RC-14 | 98.093 | 537 | 797 |
| PTA-126787 | RC-18 | 98.093 | 537 | 797 |
| PTA-126787 | SD2112 | 98.082 | 590 | 797 |
| PTA-126787 | DSM17938 | 98.080 | 591 | 797 |
| PTA-126787 | DSM20016 | 95.497 | 523 | 797 |
| PTA-126787 | ATCC53608 | 95.171 | 532 | 797 |
| PTA-126788 | CF48-3A | 98.221 | 553 | 825 |
| PTA-126788 | SD2112 | 98.149 | 581 | 825 |
| PTA-126788 | DSM17938 | 98.142 | 582 | 825 |
| PTA-126788 | RC-14 | 98.063 | 532 | 825 |
| PTA-126788 | RC-18 | 98.063 | 532 | 825 |
| PTA-126788 | DSM20016 | 95.609 | 516 | 825 |
| PTA-126788 | ATCC53608 | 95.028 | 545 | 825 |

### C. Comparative Genomics Analyses

[0377] Ortholog analysis was performed to identify paralogous and/or orthologous relationships between genomes of L. reuteri strains PTA-126787 and PTA-126788 against L. reuteri strains ATCC 53608, CF48-3A, DSM20016 and SD2112 (the parent strain of DSM17938) using OrthoFinder (TABLE 6 and 7). Genes unique to strains PTA-126787 and PTA-126787 are presented in TABLE 8. L. reuteri strains PTA-126787 and PTA-126788 shared the high number of orthologs amongst the strains compared in the analysis with 2264 and 2242 shared genes among them, respectively (TABLE 6).

TABLE 6
Orthologs shared between L. reuteri strains.

| | | | | PTA- | PTA- | |
|---|---|---|---|---|---|---|
| | ATCC53608 | CF48-3A | DSM20016 | 126787 | 126788 | SD2112 |
| ATCC53608 | 0 | 1597 | 1612 | 1572 | 1523 | 1612 |
| CF48-3A | 1568 | 0 | 1610 | 1680 | 1631 | 2082 |
| DSM20016 | 1583 | 1609 | 0 | 1621 | 1569 | 1614 |
| PTA- | 1582 | 1696 | 1628 | 0 | 2264 | 1715 |
| 126787 | | | | | | |
| PTA- | | | | | | |
| 126788 | 1553 | 1659 | 1589 | 2242 | 0 | 1677 |
| SD2112 | 1660 | 2148 | 1661 | 1788 | 1745 | 0 |

TABLE 7
Summary of ortholog statistics of L. reuteri strains.

| | ATCC | CF48- | DSM20 | PTA- | PTA- | |
|---|---|---|---|---|---|---|
| | 53608 | 3A | 016 | 126787 | 126788 | SD2112 |
| Number of genes | 1906 | 2164 | 1860 | 2397 | 2416 | 2300 |
| Number of genes in | 1764 | 2119 | 1769 | 2387 | 2303 | 2292 |
| orthogroups | | | | | | |
| Number of unassigned genes | 142 | 45 | 91 | 10 | 113 | 8 |
| Percentage of genes in | 92.5 | 97.9 | 95.1 | 99.6 | 95.3 | 99.7 |
| orthogroups | | | | | | |
| Percentage of unassigned genes | 7.5 | 2.1 | 4.9 | 0.4 | 4.7 | 0.3 |
| Number of orthogroups | 1652 | 2017 | 1706 | 2177 | 2123 | 2008 |
| containing species | | | | | | |
| Percentage of orthogroups | 63.8 | 77.8 | 65.8 | 84 | 81.9 | 77.5 |
| containing species | | | | | | |
| Number of species-specific | 5 | 8 | 0 | 13 | 7 | 0 |
| orthogroups | | | | | | |
| Number of genes in species- | 10 | 16 | 0 | 26 | 15 | 0 |
| specific orthogroups | | | | | | |
| Percentage of genes in species- | 0.5 | 0.7 | 0 | 1.1 | 0.6 | 0 |
| specific orthogroups | | | | | | |

TABLE 8
Genes unique to L. reuteri PTA-126787 and PTA-126788.

| Orthogroup | PTA-126787 | PTA-126788 | Annotation |
|---|---|---|---|
| OG0002869 | IU404_00186 | | hypothetical protein |
| OG0002870 | IU404_00494 | | Phosphate-binding protein PstS 1 |
| OG0002871 | IU404_00793 | | hypothetical protein |
| OG0002872 | IU404_01929 | | 30S ribosomal protein S1 |
| OG0002873 | IU404_02246 | | hypothetical protein |
| OG0002874 | IU404_02369 | | 50S ribosomal protein L19 |
| OG0002875 | IU404_02438 | | hypothetical protein |
| OG0002876 | IU404_02439 | | hypothetical protein |
| OG0002877 | IU404_02440 | | hypothetical protein |
| OG0002878 | IU404_02495 | | hypothetical protein |
| OG0002959 | | IVR12_02318 | hypothetical protein |
| OG0002879 | | IVR12_00335 | hypothetical protein |
| OG0002880 | | IVR12_00390 | hypothetical protein |
| OG0002881 | | IVR12_00406 | hypothetical protein |
| OG0002882 | | IVR12_00450 | Argininosuccinate synthase |
| OG0002883 | | IVR12_00667 | hypothetical protein |
| OG0002884 | | IVR12_00951 | hypothetical protein |
| OG0002885 | | IVR12_01333 | UDP-N-acetylmuramoyl-L-alanyl-D-glutamate-- |
| | | | L- lysine ligase |
| OG0002886 | | IVR12_01986 | hypothetical protein |
| OG0002887 | | IVR12_02184 | hypothetical protein |
| OG0002888 | | IVR12_02193 | hypothetical protein |
| OG0002889 | | IVR12_02204 | hypothetical protein |
| OG0002890 | | IVR12_02210 | UDP-N-acetylmuramate--L-alanine ligase |
| OG0002891 | | IVR12_02211 | Inner membrane protein YbhL |
| OG0002892 | | IVR12_02212 | hypothetical protein |
| OG0002893 | | IVR12_02213 | DNA polymerase I |
| OG0002894 | | IVR12_02214 | Formamidopyrimidine-DNA glycosylase |
| OG0002895 | | IVR12_02215 | Dephospho-CoA kinase |
| OG0002896 | | IVR12_02217 | Replication initiation and membrane attachment |
| | | | protein |
| OG0002897 | | IVR12_02218 | Primosomal protein DnaI |
| OG0002898 | | IVR12_02219 | hypothetical protein |
| OG0002899 | | IVR12_02220 | Translation initiation factor IF-3 |
| OG0002900 | | IVR12_02221 | 50S ribosomal protein L35 |
| OG0002901 | | IVR12_02222 | 50S ribosomal protein L20 |
| OG0002902 | | IVR12_02223 | hypothetical protein |
| OG0002903 | | IVR12_02224 | hypothetical protein |
| OG0002904 | | IVR12_02225 | hypothetical protein |
| OG0002905 | | IVR12_02228 | hypothetical protein |
| OG0002906 | | IVR12_02230 | putative protein YqeH |
| OG0002907 | | IVR12_02231 | RNA-binding protein |
| OG0002908 | | IVR12_02234 | Ribosomal silencing factor RsfS |
| OG0002909 | | IVR12_02235 | 2-methoxy-6-polyprenyl-1,4-benzoquinol |
| | | | methylase, mitochondrial |
| OG0002910 | | IVR12_02237 | hypothetical protein |
| OG0002911 | | IVR12_02238 | 50S ribosomal protein L32 |
| OG0002912 | | IVR12_02240 | Adaptive-response sensory-kinase SasA |
| OG0002913 | | IVR12_02242 | Inner membrane transporter YjeM |
| OG0002914 | | IVR12_02243 | Multidrug export protein MepA |
| OG0002915 | | IVR12_02245 | Membrane protein insertase MisCB |
| OG0002916 | | IVR12_02248 | 23S rRNA (guanosine-2′-O-)-methyltransferase |
| | | | RlmB |
| OG0002917 | | IVR12_02250 | HTH-type transcriptional regulator YodB |
| OG0002918 | | IVR12_02255 | Transcription elongation factor GreA |
| OG0002919 | | IVR12_02256 | hypothetical protein |
| OG0002920 | | IVR12_02258 | Penicillin-binding protein 2B |
| OG0002921 | | IVR12_02259 | Penicillin-binding protein 2B |
| OG0002922 | | IVR12_02260 | 50S ribosomal protein L33 1 |
| OG0002923 | | IVR12_02261 | putative protein YqgN |
| OG0002924 | | IVR12_02265 | Glucokinase |
| OG0002925 | | IVR12_02266 | putative protein YibN |
| OG0002926 | | IVR12_02267 | hypothetical protein |
| OG0002927 | | IVR12_02270 | Glutamate--tRNA ligase |
| OG0002928 | | IVR12_02271 | putative N-acetyl-LL-diaminopimelate |
| | | | aminotransferase |
| OG0002929 | | IVR12_02272 | IS30 family transposase ISHahy10 |
| OG0002930 | | IVR12_02273 | Aspartate/prephenate aminotransferase |
| OG0002931 | | IVR12_02274 | Aspartate aminotransferase |
| OG0002932 | | IVR12_02275 | putative N-acetyl-LL-diaminopimelate |
| | | | aminotransferase |
| OG0002933 | | IVR12_02276 | hypothetical protein |
| OG0002934 | | IVR12_02280 | Tyrosine recombinase XerC |
| OG0002935 | | IVR12_02282 | hypothetical protein |
| OG0002936 | | IVR12_02283 | hypothetical protein |
| OG0002937 | | IVR12_02284 | hypothetical protein |
| OG0002938 | | IVR12_02285 | hypothetical protein |
| OG0002939 | | IVR12_02286 | hypothetical protein |
| OG0002940 | | IVR12_02287 | hypothetical protein |
| OG0002941 | | IVR12_02288 | hypothetical protein |
| OG0002942 | | IVR12_02289 | hypothetical protein |
| OG0002943 | | IVR12_02290 | hypothetical protein |
| OG0002944 | | IVR12_02291 | hypothetical protein |
| OG0002945 | | IVR12_02294 | hypothetical protein |
| OG0002946 | | IVR12_02295 | hypothetical protein |
| OG0002947 | | IVR12_02296 | hypothetical protein |
| OG0002948 | | IVR12_02299 | hypothetical protein |
| OG0002949 | | IVR12_02300 | hypothetical protein |
| OG0002950 | | IVR12_02305 | hypothetical protein |
| OG0002951 | | IVR12_02307 | hypothetical protein |
| OG0002952 | | IVR12_02308 | hypothetical protein |
| OG0002953 | | IVR12_02310 | hypothetical protein |
| OG0002954 | | IVR12_02312 | hypothetical protein |
| OG0002955 | | IVR12_02313 | hypothetical protein |
| OG0002956 | | IVR12_02314 | hypothetical protein |
| OG0002957 | | IVR12_02316 | Endoribonuclease PemK |
| OG0002958 | | IVR12_02317 | Antitoxin MazE |
| OG0002959 | | IVR12_02318 | hypothetical protein |
| OG0002960 | | IVR12_02319 | hypothetical protein |
| OG0002961 | | IVR12_02320 | hypothetical protein |
| OG0002962 | | IVR12_02321 | hypothetical protein |
| OG0002963 | | IVR12_02322 | hypothetical protein |
| OG0002964 | | IVR12_02323 | hypothetical protein |
| OG0002965 | | IVR12_02324 | Chromosome partition protein Smc |
| OG0002966 | | IVR12_02325 | hypothetical protein |
| OG0002967 | | IVR12_02326 | hypothetical protein |
| OG0002968 | | IVR12_02327 | hypothetical protein |
| OG0002969 | | IVR12_02329 | Tyrosine recombinase XerC |
| OG0002970 | | IVR12_02330 | hypothetical protein |
| OG0002971 | | IVR12_02331 | hypothetical protein |
| OG0002972 | | IVR12_02333 | hypothetical protein |
| OG0002973 | | IVR12_02334 | hypothetical protein |
| OG0002974 | | IVR12_02335 | hypothetical protein |
| OG0002975 | | IVR12_02336 | hypothetical protein |
| OG0002976 | | IVR12_02337 | hypothetical protein |
| OG0002977 | | IVR12_02338 | Glutaredoxin-like protein NrdH |
| OG0002978 | | IVR12_02339 | hypothetical protein |
| OG0002979 | | IVR12_02340 | DNA topoisomerase 3 |
| OG0002980 | | IVR12_02346 | hypothetical protein |
| OG0002981 | | IVR12_02348 | hypothetical protein |
| OG0002982 | | IVR12_02350 | Signal peptidase IB |
| OG0002983 | | IVR12_02351 | hypothetical protein |
| OG0002984 | | IVR12_02352 | hypothetical protein |
| OG0002985 | | IVR12_02390 | hypothetical protein |
| OG0002986 | | IVR12_02440 | hypothetical protein |
| OG0002987 | | IVR12_02585 | hypothetical protein |
| OG0002988 | | IVR12_02601 | hypothetical protein |
| OG0002989 | | IVR12_02602 | hypothetical protein |
| OG0002990 | | IVR12_02603 | hypothetical protein |
| OG0002991 | | IVR12_02604 | hypothetical protein |

### D. Screening for Prophages, Insertion Sequences and Transposases

[0378] Both strains were scanned for the presence of mobile genetic elements such as prophages, insertion sequences (IS) and transposases. Six prophage regions in strain PTA-126787 and eight regions in PTA-126788 were identified (FIGS. 9 A and B; TABLE 9). However, there were 12 phage genes (all coding for Tyrosine recombinase protein) in PTA-126788 that were outside of prophage regions (TABLE 9). Putative IS and associated proteins predicted by ISEscan reveal 86 coding sequences in 10 IS families in strain PTA-126787 and 88 coding sequences in 18 IS families in strain PTA-126788 (TABLE 10; data not shown).

TABLE 9
Prophage in L. reuteri strains DSM
17938, PTA-126787 and PTA-126788.

| | | | |
|---|---|---|---|
| Chromosome | Feature | Start | End |

L. reuteri i DSM 17938

| | | | |
|---|---|---|---|
| DSM_1 | prophage_region | 162588 | 187315 |
| DSM_1 | attL | 161835 | 161847 |
| DSM_1 | attR | 187473 | 187485 |
| DSM_1 | prophage_region | 472700 | 511947 |
| DSM_1 | attL | 472715 | 472755 |
| DSM_1 | attR | 513707 | 513747 |
| DSM_1 | prophage_region | 527443 | 568241 |
| DSM_1 | attL | 527458 | 527498 |
| DSM_1 | attR | 568450 | 568490 |
| DSM_1 | prophage_region | 876952 | 907794 |
| DSM_1 | attL | 876967 | 877007 |
| DSM_1 | attR | 917959 | 917999 |
| DSM_1 | prophage_region | 2093038 | 2137900 |
| DSM_1 | attL | 2093053 | 2093093 |
| DSM_1 | attR | 2134045 | 2134085 |

L. reuteri i PTA-126788

| | | | |
|---|---|---|---|
| IU404_1 | prophage_region | 152457 | 167686 |
| IU404_1 | attL | 156168 | 156181 |
| IU404_1 | attR | 168138 | 168151 |
| IU404_1 | prophage_region | 290891 | 320979 |
| IU404_1 | attL | 289594 | 289607 |
| IU404_1 | attR | 319801 | 319814 |
| IU404_1 | prophage_region | 1720774 | 1762428 |
| IU404_1 | attL | 1718988 | 1719000 |
| IU404_1 | attR | 1763086 | 1763098 |
| IU404_1 | prophage_region | 1951294 | 1986058 |
| IU404_1 | attL | 1950720 | 1950733 |
| IU404_1 | attR | 1983717 | 1983730 |
| IU404_1 | prophage_region | 2129199 | 2187993 |
| IU404_1 | attL | 2132872 | 2132887 |
| IU404_1 | attR | 2184180 | 2184195 |
| IU404_1 | prophage_region | 2272336 | 2297075 |
| IU404_1 | attL | 2274787 | 2274924 |
| IU404_1 | attR | 2292319 | 2292456 |

L. reuteri i PTA-126788

| | | | |
|---|---|---|---|
| IVR12_1 | prophage_region | 59142 | 102453 |
| IVR12_1 | attL | 60071 | 60088 |
| IVR12_1 | attR | 102593 | 102610 |
| IVR12_1 | prophage_region | 272211 | 335768 |
| IVR12_1 | attL | 270691 | 270703 |
| IVR12_1 | attR | 333993 | 334005 |
| IVR12_1 | prophage_region | 653929 | 686757 |
| IVR12_1 | attL | 654858 | 654875 |
| IVR12_1 | attR | 697380 | 697397 |
| IVR12_1 | prophage_region | 1870956 | 1891239 |
| IVR12_1 | attL | 1870254 | 1870339 |
| IVR12_1 | attR | 1906483 | 1906568 |
| IVR12_1 | prophage_region | 1953921 | 1961107 |
| IVR12_1 | attL | 1953219 | 1953304 |
| IVR12_1 | attR | 1989448 | 1989533 |
| IVR12_1 | prophage_region | 2044154 | 2082229 |
| IVR12_1 | attL | 2043452 | 2043537 |
| IVR12_1 | attR | 2079681 | 2079766 |
| IVR12_2 | prophage_region | 57619 | 72552 |
| IVR12_2 | attL | 56917 | 57002 |
| IVR12_2 | attR | 93146 | 93231 |
| IVR12_3 | prophage_region | 31417 | 68097 |
| IVR12_3 | attL | 30715 | 30800 |
| IVR12_3 | attR | 66944 | 67029 |

TABLE 10
IS elements identified in L. reuteri
PTA-126787 and PTA-126788 genomes.
L. reuteri PTA-126787

| | | | % of | Length of | |
|---|---|---|---|---|---|
| | | | genome | sequence | |
| | | | sequence | segments | |
| | Family | | content | spanned | |
| | name | Number | spanned | by IS | Length of |
| Sequence | of IS | of IS | by IS | elements in | specific |
| identifier | element | copies | elements | a sequence | sequence |
| IU404_1 | IS110 | 6 | 0.41 | 9431 | 2297299 |
| IU404_1 | IS1182 | 3 | 0.23 | 5390 | 2297299 |
| IU404_1 | IS200/ | 19 | 1.35 | 31052 | 2297299 |
| | IS605 | | | | |
| IU404_1 | IS21 | 3 | 0.17 | 3921 | 2297299 |
| IU404_1 | IS3 | 5 | 0.35 | 7998 | 2297299 |
| IU404_1 | IS30 | 41 | 2.16 | 49546 | 2297299 |
| IU404_1 | IS66 | 5 | 0.42 | 9725 | 2297299 |
| IU404_1 | ISL3 | 1 | 0.04 | 806 | 2297299 |
| IU404_2 | IS30 | 2 | 44.04 | 16812 | 38177 |
| IU404_3 | IS30 | 1 | 4.56 | 1259 | 27631 |
| PTA- | total | 86 | 5.67 | 135940 | 2399045 |
| 126787 | | | | | |

L. reuteri PTA-126788

| | | | % | Length of | |
|---|---|---|---|---|---|
| | | | genome | sequence | |
| | | | sequence | segments | |
| | Family | | content | spanned | |
| | name | Number | spanned | by IS | Length of |
| Sequence | of IS | of IS | by IS | elements in | specific |
| identifier | element | copies | elements | a sequence | sequence |
| IVR12_1 | IS110 | 4 | 0.32 | 6649 | 2096256 |
| IVR12_1 | IS1182 | 2 | 0.17 | 3654 | 2096256 |
| IVR12_1 | IS200/ | 16 | 1.21 | 25318 | 2096256 |
| | IS605 | | | | |
| IVR12_1 | IS21 | 3 | 0.21 | 4430 | 2096256 |
| IVR12_1 | IS3 | 5 | 0.38 | 7998 | 2096256 |
| IVR12_1 | IS30 | 36 | 2.16 | 45270 | 2096256 |
| IVR12_1 | IS66 | 5 | 0.46 | 9725 | 2096256 |
| IVR12_1 | ISL3 | 1 | 0.04 | 806 | 2096256 |
| IVR12_2 | IS200/ | 4 | 3.76 | 6243 | 165920 |
| | IS605 | | | | |
| IVR12_2 | IS3 | 1 | 0.1 | 168 | 165920 |
| IVR12_2 | IS30 | 2 | 1.28 | 2118 | 165920 |
| IVR12_3 | IS110 | 2 | 1.98 | 2973 | 150023 |
| IVR12_3 | IS1182 | 1 | 1.19 | 1792 | 150023 |
| IVR12_3 | IS200/ | 2 | 2.14 | 3214 | 150023 |
| | IS605 | | | | |
| IVR12_3 | IS30 | 2 | 1.54 | 2316 | 150023 |
| IVR12_4 | IS200/ | 1 | 3.74 | 1583 | 42311 |
| | IS605 | | | | |
| IVR12_5 | IS200/ | 1 | 4.69 | 570 | 12147 |
| | IS605 | | | | |
| PTA- | total | 88 | 5.03 | 124827 | 2482713 |
| 126788 | | | | | |

### E. Absence of Virulence Factors and Toxins

[0379] Both L. reuteri PTA-126787 (5 contigs) and PTA-126788 (7 contigs) strains were confirmed to be free of known virulence factors and/or toxins by comparing against virulence factor database (VFDB; search parameters of >80% identity and >80% alignment length/coverage), which is an integrated comprehensive online resource database for curating information about bacterial virulence factors and/or toxins (51).

### F. Absence of Acquired Antimicrobial Resistance Genes

[0380] The Pariza et al. (34) decision tree and the EFSA Panel on Additives and Products or Substances used in Animal Feed (35) recommend that microbial strains used in food applications must not harbor acquired antimicrobial resistance genes to clinically relevant antimicrobials. Search for antimicrobial resistance genes was carried out for both L. reuteri strains by comparing the genomes against multiple AMR databases including NCBI-AMR, Resfinder DB and ARG-ANNOT using Abricate. The screening identified tetracycline-resistant ribosomal protection protein (tetW) that confers resistance to tetracycline as one potential gene of health concern (TABLE 11) (34). The tetW predicted protein sequence is shown below and the encoding nucleic acid sequence is further provided along with flanking sequences as well.

TABLE 11
Predicted antimicrobial resistance genes in
L. reuteri strains PTA-126787 and PTA-126788.

| | Chro- | | | Iden- | Cover- | Anno- |
|---|---|---|---|---|---|---|
| | mo- | | Size | tity | age | ta- |
| Strain | some | Location | (bp) | (%) | (%) | tion |
| PTA- | IU404_ | 723,894- | 1920 | 100 | 99.96 | Tet |
| 126787 | 1 | 725,813 | | | | (W) |
| PTA- | IVR12_ | 1,090,027- | 1920 | 100 | 99.96 | Tet |
| 126788 | 1 | 1,091,946 | | | | (W) |

tetW protein (SEQ ID NO: 58)
MKIINIGILAHVDAGKTTLTESLLYASGAISEPGSVKKGTTRTDTMF
LERQRGITIQAAVTSFQWHRCKVNIVDTPGHMDFLAEVYRSLAVLDG
AILVISAKDGVQAQTRILFHALRKMNIPTVIFINKIDQAGVDLQSVV
QSVRDKLSADIIIKQTVSLSPEIVLEENTDIEAWDAVIENNDKLLEK
YIAGEPISREKLVREEQRRVQDASLFPVYYGSAKKGLGIQPLMDAVT
GLFQPIGEQGSAALCGSVFKVEYTDCGQRRVYLRLYSGTLRLRDTVA
LAGREKLKITEMRIPSKGEIVRTDTAYPGEIVILPSDSVRLNDVLGD
PTRLPRKRWREDPLPMLRTSIAPKTAAQRERLLDALTQLADTDPLLR
CEVDSITHEIILSFLGRVQLEVVSALLSEKYKLETVVKEPTVIYKER
PLKAASHTIHIEVPPNPFWASIGLSVTPLPLGSGVQYESRVSLGYLN
QSFQNAVRDGIRYGLEQGLFGWNVTDCKICFEYGLYYSPVSTPADFR
SLAPIVLEQALKESGTQLLEPYLSFTLYAPREYLSRAYHDAPKYCAT
IETVQVKKDEVVFTGEIPARCIQAYRTDLAFYTNGQSVCLTELKGYQ
AADGKPVIQPRRPNSRLDKVRYMFQKIM

### G. Screening for Genes Involved in Biogenic Amines and Toxins

[0381] Functional annotation of the entire genomes of L. reuteri strains PTA-126787 and PTA-126788 revealed that they do not contain any known protein-encoding genes involved in the production of biogenic amines with the exception of CDS encoding for arginine deiminase. No other toxins were identified (TABLE 12).

TABLE 12
Identified protein-coding genes putative for arginine deiminase pathway.

| | | | | | |
|---|---|---|---|---|---|
| | | | | | Size |
| Locus tag | Gene function | Start | End | Strand | (bp) |

Strain 3630

| | | | | | |
|---|---|---|---|---|---|
| IU404_01433 | Ornithine carbamoyltransferase | 1,356,883 | 1,357,890 | Forward | 1008 |
| | (EC 2.1.3.3) | | | | |
| IU404_01450 | Arginine deiminase (EC | 1,372,477 | 1,373,709 | Forward | 1233 |
| | 3.5.3.6) | | | | |
| IU404_01452 | Arginine/ornithine antiporter | 1,374,302 | 1,375,723 | Forward | 1422 |
| | ArcD1 | | | | |
| IU404_01453 | Arginine/ornithine antiporter | 1,375,781 | 1,377,178 | Forward | 1398 |
| | ArcD1 | | | | |
| IU404_01451 | Arginine repressor | 1,373,820 | 1,374,281 | Forward | 462 |
| IU404_02399 | Arginine repressor | 2,199,921 | 2,200,373 | Reverse | 453 |

Strain 3632

| | | | | | |
|---|---|---|---|---|---|
| IVR12_01894 | Ornithine carbamoyltransferase | 1,720,823 | 1,721,830 | Forward | 1008 |
| | (EC 2.1.3.3) | | | | |
| IVR12_01911 | Arginine deiminase (EC | 1,736,417 | 1,737,649 | Forward | 1233 |
| | 3.5.3.6) | | | | |
| IVR12_00724 | Arginine/ornithine antiporter | 608,272 | 609,693 | Forward | 1422 |
| | ArcD1 | | | | |
| IVR12_01913 | Arginine/ornithine antiporter | 1,738,242 | 1,739,663 | Forward | 1422 |
| | ArcD1 | | | | |
| IVR12_01914 | Arginine/ornithine antiporter | 1,739,721 | 1,741,118 | Forward | 1398 |
| | ArcD1 | | | | |
| IVR12_01912 | Arginine repressor | 1,737,760 | 1,738,221 | Forward | 462 |

### H. Genes Involved in the Production of Lactic Acid and Other Beneficial Metabolites

[0382] Both strains, PTA-126787 and PTA-126788, contain genes responsible for production of lactic acids. A total of four coding sequences (CDS) were predicted to encode for D-lactate dehydrogenase (EC 1.1.1.28) and four CDS for L-lactate dehydrogenase (EC 1.1.1.27) were found on different loci within the genome (TABLE 13). However, IVR12_00498 gene in strain PTA-126788 is a pseudogene due to a frameshift mutation. The coding sequence putative for a therapeutically useful peptide, S-ribosylhomocysteinelyase (EC 4.4.1.21; IU404_00512 and IVR12_00964) was also present in the genomes of strains PTA-126787 and PTA-126788, respectively.

[0383] Several coding sequences involved in adhesion of Lactobacilli to intestinal epithelium were identified in the genome (TABLE 14). Some of the genes involved in adhesion to host found in both strains are sortase A, epsilon subunit related 3′-5′ exonuclease, exopolysaccharide biosynthesis protein and ATP synthase epsilon subunit (TABLE 14). Search for desired stress tolerance features in both L. reuteri strains revealed the presence of CDS predictably encoding for DNA protection during starvation protein (TABLE 14). Another stress resistant gene putatively encoding for Phosphate starvation-inducible PhoH-like protein, predicted ATPase was also found in both strains (TABLE 14).

TABLE 13
Putative genes in PTA-126787 and PTA-126788 involved in lactic acids production.

| | | | | | Size | |
|---|---|---|---|---|---|---|
| Gene function | Strain | Chromosome | Position | Locus Tag | (bp) | Strand |
| D-lactate | PTA- | IU404_1 | 531,116- | IU404_00583 | 1,014 | Reverse |
| dehydrogenase (EC | 126787 | | 532,129 | | | |
| 1.1.1.28) | | IU404_1 | 606,464- | IU404_00662 | 1,086 | Forward |
| | | | 607,549 | | | |
| | | IU404_1 | 866,523- | IU404_00944 | 996 | Reverse |
| | | | 867,518 | | | |
| | | IU404_1 | 1,632,717- | IU404_01740 | 993 | Forward |
| | | | 1,633,709 | | | |
| | PTA- | IVR12_1 | 409,989- | IVR12_00498 | 992 | Reverse |
| | 126788 | | 410,980 | | | |
| | | IVR12_1 | 897,268- | IVR12_01036 | 1014 | Reverse |
| | | | 898,281 | | | |
| | | IVR12_1 | 972,605- | IVR12_01115 | 1086 | Forward |
| | | | 973,690 | | | |
| | | IVR12_1 | 1,230,501- | IVR12_01396 | 996 | Reverse |
| | | | 1,231,496 | | | |
| L-lactate | PTA- | IU404_1 | 72,380- | IU404_00084 | 939 | Forward |
| dehydrogenase (EC | 126787 | | 73,318 | | | |
| 1.1.1.27) | | IU404_1 | 386,913- | IU404_00448 | 942 | Reverse |
| | | | 387,854 | | | |
| | | IU404_1 | 1,664,098- | IU404_01769 | 960 | Reverse |
| | | | 1,665,057 | | | |
| | | IU404_1 | 1,871,024- | IU404_02013 | 975 | Forward |
| | | | 1,871,998 | | | |
| | PTA- | IVR12_1 | 171,961- | IVR12_00207 | 975 | Reverse |
| | 126788 | | 172,935 | | | |
| | | IVR12_1 | 378,643- | IVR12_00467 | 960 | Forward |
| | | | 379,602 | | | |
| | | IVR12_1 | 752,015- | IVR12_00899 | 942 | Forward |
| | | | 752,956 | | | |
| | | IVR12_1 | 1,968,618- | IVR12_02186 | 939 | Reverse |
| | | | 1,969,556 | | | |

Note:
IVR12_00498 encoding D-lactate dehydrogenase (EC 1.1.1.28) is a pseudogene due to frameshift.

TABLE 14
Identified protein-encoding genes putative for adhesion
by L. reuteri strains PTA-126787 and PTA-126788.

| | | | |
|---|---|---|---|
| Locus Tag | Size | Gene Function | Strand |

Strain PTA-126787

| | | | |
|---|---|---|---|
| IU404_01324 | 178 | exonuclease | Reverse |
| IU404_02160 | 82 | exopolysaccharide biosynthesis protein | Reverse |
| IU404_01408 | 143 | F0F1 ATP synthase subunit epsilon | Forward |
| IU404_01134 | 234 | class A sortase | Forward |

Strain PTA-126788

| | | | |
|---|---|---|---|
| IVR12_01729 | 178 | exonuclease | Reverse |
| IVR12_02549 | 82 | exopolysaccharide biosynthesis protein | Forward |
| IVR12_01813 | 143 | F0F1 ATP synthase subunit epsilon | Forward |
| IVR12_01541 | 234 | class A sortase | Forward |

### Antimicrobial Susceptibility

[0384] Minimum inhibitory concentrations were analyzed against relevant antibiotics according to EFSA guidelines (EFSA Panel on Additives and Products or Substances used in Animal Feed) (35), including Ampicillin, Vancomycin, Gentamicin, Kanamycin, Streptomycin, Erythromycin, Clindamycin, Tetracycline and Chloramphenicol. L. reuteri PTA-126788 and PTA-126787 strains were determined to be sensitive to all relevant tested antibiotics according to EFSA guidelines (35), with MIC values at or below the reported species characteristic cut-off values (TABLE 15), except for tetracycline. For tetracycline, the MIC values for our strains were two-fold dilution above the EFSA microbiological cut off value, in one of the two biological replicates. However, this is considered acceptable due to the technical variation of the phenotypic method as recognized previously (59).

TABLE 15
Susceptibility of L. reuteri PTA-126787 and PTA-
126788 to EFSA Critically Important Antibiotics.

| | | | EFSA microbiological |
|---|---|---|---|
| | L. reuteri | L. reuteri | cut off values for |
| | PTA-126788 | PTA-126787 | L. reuteri |
| Clindamycin | ≥0.06 | ≥0.06 | 4 |
| Chloramphenicol | 2 | 2 | 4 |
| Erythromycin | 0.12 | 0.12 | 1 |
| Gentamicin | 1 | 1 | 8 |
| Kanamycin | 16 | 16 | 64 |
| Streptomycin | 8 | 8 | 64 |
| Tetracycline | 32/64 | 32/64 | 32 |
| Ampicillin | 1 | 1 | 2 |

### Biogenic Amine Production

[0385] Many lactic acid bacteria produce biogenic amines such as histamine, tyramine, putrescine and/or cadaverine by amino acid decarboxylation of histidine, tyrosine, ornithine and/or lysine, respectively. The few instances of toxicity cases are associated with histamine and to some extent tyramine. Consistent with the bioinformatics results, neither of the subject L. reuteri strains were able to produce the major biogenic amines histamine, tyramine, putrescine or cadaverine. As expected, L. reuteri ATCC 23272 produced a positive reaction in the area of bacterial growth on the decarboxylase base media supplemented with L-histidine. Control plates lacking these amino acids showed no positive reaction for any of the strains tested.

### D- and L-Lactate Production

[0386] Quantitative determination of lactic acid production showed that the two L. reuteri strains produce both L- and D-lactic acids but predominantly L-lactic acid (FIG. 4). Similarly, L. reuteri DSM 17938 also produced L- and D-lactic acids but predominantly L-lactic acid (FIG. 4). L. reuteri strain ATCC 23272 produced approximately equal amounts of L- and D-lactic acids (FIG. 4).

### Autoaggregation

[0387] Autoaggregation is a phenomenon where bacteria form fibrous-like aggregates after overnight growth and settle to the bottom of the tube. Once the bacteria are aggregated, they generally do not redisperse unless vigorously mixed manually. Autoaggregation appears to be one of the key properties needed for probiotic strains to attach to the epithelial cells in the gastrointestinal tract. The ability to aggregate has also been suggested to play a role in preventing pathogen colonization. As shown in FIG. 5A, L. reuteri PTA-126788 showed excellent ability to autoaggregate, while the other L. reuteri strains PTA-126787 and DSM 17938 showed no ability to form aggregates. Similar to L. reuteri PTA-126788, the positive control, L. reuteri ATCC 23272 also showed ability to autoaggregate (FIG. 5A). Quantification of autoaggregation showed that L. reuteri PTA-126788 (strain 3632) exhibited the highest ability to autoaggregate, while L. reuteri strains PTA-126787 and DSM 17938 had the least ability to form aggregates (FIG. 5B). The positive control L. reuteri ATCC 23272 showed moderate ability to autoaggregate (FIG. 5B).

### Hydrogen Peroxide Production

[0388] The ability of probiotic strains to produce hydrogen peroxide at physiological levels is highly desirable. Hydrogen peroxide production by Lactobacillus johnsonii has been attributed to inducing recovery of the epithelial barrier and remission in inflammatory bowel disease (60). Similarly, an L. reuteri probiotic strain producing hydrogen peroxide was able to significantly reduce proinflammatory response and improved clinical outcomes in human patients with chronic periodontitis (61). All the L. reuteri strains including PTA-126787 and PTA-126788 strains showed moderate to high ability to produce hydrogen peroxide as shown in FIG. 6.

### Resistance to Bile

[0389] The ability of the two L. reuteri strains to tolerate bile salts was also assessed by incubating the strains in the presence of 0.3% bile salts. The viability of L. reuteri PTA-126787, PTA-126788 and DSM 17938 did not change after incubation with 0.3% bile salts for 4 hours, suggesting that our strains are resistant to 0.3% bile salts similar to DSM 17938 (FIG. 7).

### Resistance to Acidic pH

[0390] The viability of L. reuteri PTA-126787 decreased from 2.81×108 to 2.75×106 after incubation at pH 2.5 for 3 hours (FIG. 8). Similarly, the viability of L. reuteri PTA-126788 decreased from 1.22×108 to 6.67×105 after 3 hours incubation at pH 2.5 (FIG. 8). Overall, there was approximately 2-log reduction in viability for PTA-126787 and approximately 2.5-log reduction in viability for PTA-126788 after incubation at pH 2.5 for 3 hours (FIG. 8). The control strain DSM 17938 also showed approximately 2.5-log reduction in CFU counts from 5.51×108 to 1.57×106 after 3 hours incubation at pH 2.5 (FIG. 8).

### In Vivo Safety in Broilers

[0391] Compared to untreated control, groups treated with L. reuteri PTA-126787 and PTA-126788 daily in drinking water had no mortality, morbidity or adverse events in broiler chickens. Necropsy on day 26 showed no gross lesions indicative of health issues. Compared to the control group, histopathological analysis of trachea, lung and cecal tonsils from the groups treated with L. reuteri PTA-126787 or PTA-126788 showed no evidence of inflammation or abnormal pathology compared to untreated group (data not shown).

### Discussion

[0392] Our understanding of the microbiome and its impact on human and animal health is rapidly evolving, leading to the identification of innovative ways to impact human and animal diseases. Undoubtedly, the past two decades have witnessed a tremendous progress in the area of probiotics highlighting their key role in supporting general health, enhancing immune function and showing the potential to reduce specific diseases. Research has repeatedly shown that the survival, safety, and efficacy properties of probiotic candidates are strain specific and cannot be generalized. In the present study, we isolated two novel Lactobacillus strains from chicken, identified them as L. reuteri and established their safety using various genomic, in vitro, and in vivo studies, supporting their application as potential probiotics for human and animal health.

[0393] Identification is the first step in establishing the safety of a probiotic candidate and regulatory agencies recommend that at least two state-of-the-art methods be used to correctly identify a probiotic candidate (35, 62). API 50 CHL analysis identified our strains as L. fermentum. L. reuteri is a subtype of L. fermentum and the two species are indistinguishable at the biochemical level (63).

[0394] 16S rRNA identification confirmed that our strains have closest homology to L. reuteri strains. Whole-genome sequencing coupled with phylogenetic analyses further confirmed that our strains have closest relatedness to L. reuteri and that our strains genetically cluster with DSM 17938, SD2112 (parent strain of DSM 17938) and RC-14. DSM 17938 and RC-14 are widely used as part of several commercially marketed dietary supplements and functional foods and there exists a plethora of clinical evidence supporting their safety and efficacy for different disease indications in humans. Consistent with our findings, several previous whole-genome phylogenetic studies also showed that the parent strain of DSM 17938, SD2112 indeed clusters with poultry isolates under poultry/human lineage IV and the authors from these studies hypothesized that SD2112 may have indeed originated from poultry (64-67). All together, these findings clearly establish that our strains belong to L. reuteri species and that our strains have closest homology to the two commercially marketed probiotic candidates with proven human clinical safety, DSM 17938 and RC-14.

[0395] Long read sequencing technology enabled complete genome characterization with each chromosome and plasmid represented by large, nearly complete contigs. Comprehensive functional annotation of the L. reuteri strains PTA-126787 and PTA-126788 revealed presence of several genes important for probiotic efficacy. Probiotic bacteria are known to contain bioactive secondary metabolites that interact with other pathogenic bacteria to attenuate virulence (68-71). For instance, lactic acids produced by lactic acid bacteria inhibit the growth and survival of nearby pathogens and inactivate human immunodeficiency virus by increasing acidity of the surrounding environment (72). Both PTA-126787 and PTA-126788 strains contain four coding sequences encoding D-lactate dehydrogenase (EC 1.1.1.28) and four encoding L-lactate dehydrogenase (EC 1.1.1.27) which are responsible for lactic acid production. However, IVR12_00498 from strain PTA-126787 is a pseudogene due to a frameshift mutation.

[0396] One of the key desirable traits in a probiotic candidate is the ability to adhere to epithelial cells. The genes identified in both strains of L. reuteri putatively encode proteins involved in adhesion, providing stability to the strains and the ability to compete with other undesirable resident gut bacteria, thereby enabling effective colonization of the gut and exclusion of pathogens (73, 74). Sortase-dependent proteins are an important group of cell surface proteins in Lactobacillus spp. and are responsible for sorting various kinds of cell surface proteins, thus playing an important role in adhesion (75). The genomes of both strains contain the gene encoding phosphate starvation-inducible protein PhoH, a member of both the Pho regulon and the sB-regulated general stress regulon. Pho regulon plays a key role in regulating phosphate homeostasis and is generally induced in response to phosphate starvation. The sB-dependent general stress proteins are predicted to provide cells with several kinds of non-specific stress tolerance (76).

[0397] While the diversity of phages in gut ecosystems is getting increasingly well-characterized, knowledge is limited on how phages contribute to the evolution and ecology of their host bacteria (77, 78). Prophage analysis of L. reuteri strain DSM 17938 showed 5 prophage regions while the strains, PTA-126787 and PTA-126788 had 6 and 8 prophage regions, respectively (S9 Table). Prophages can be advantageous for gut symbionts like L. reuteri by increasing its competitiveness in the intestinal niche (77).

[0398] Genome analysis identified the presence of tetW in both L. reuteri strains. tetW was found to be present on the chromosome and no elements indicative of horizontal transfer (plasmids, phages, transposons, or conjugation elements) were identified in the 15-kb flanking regions on both sides of tetW. The nucleic acid sequences encoding tetW and the flanking sequences for each of the PTA-126787 and PTA-126788 are shown below. Alignment of the tetW of the two strains and along with other neighboring genes was conducted and the tetW and flanking regions for PTA-126787 and PTA-126788 are 100% identical. Phenotypic analysis showed that the two strains are susceptible to all clinically relevant antimicrobials with MICs below the EFSA recommended microbiological cut offs, except for tetracycline. For tetracycline, both strains showed a marginal 2-fold increase in MIC than the recommended microbiological cut off and a 2-fold variation in the MIC is considered acceptable due to technical variation in the MIC assay and hence the strains can be considered phenotypically susceptible (59, 79). Together, these data suggest that the presence of tetW in our L. reuteri poses minimal risk to human and animal health.

>L. reuteri PTA-126787 (Strain 3630) tetW sequence along
with flanking gene sequence stdh CDS
(SEQ ID NO: 59)
TTAAGCTTCTTCGCCGCCAACCTTAACAACAGCTTTTGAAACCTTACCTAATTTACCACTAACAA
AGTCTTCAACACCATCAAGGTCTAATTCGTGTGAGAAGAGTGGTAGTGGGTCAACAACACCAGAA
GAAAGAAGTGCAATTGAGTCTTCAAAAGTGTAAGGGTTAATGAAGGCCCCTTGAATTGTAAGTTG
TTTTTGGAATACATCGTAAGTGTTTACTGAGAACTTGTCATCAGGGTTACCAACACCAAACATTA
ATACTTGAGCACCACGAGCTGCAGCTGCAAGTGCTTGTTCTTGAGTAGCTGGCAAACCAACCGCT
TCAACAACGATGTCATATGCATCAGCAGGAATTTCTTCCTTAGTAGTGTTGATAGTCTTAACGCC
GAAGTGCTTCCGGTTGTTTTCCAACTTTTCATCTGAACGACCAGCTAAAGTAACTTCGTGAATAC
CACGAGCCTTCAAGATTTGTGCAAATAATTGACCTTCAAAACCATCACCTAATACTAAAGCCTTT
TGGTATGGGTGAGTTTCAAGTAAGTCAACACCGTGCATTGCACATGAAATTGGTTCAACAACGGC
AGCTGCCTTTAATGAAACATCATCAGGAATTGGGTAAACAACTTTTGCAGGAGCAGTAAAGTATT
CTTCAAAACCACCGTTACGGGTAACACCAACAGCATCAAGGTGTTCACATAATTCTGGGCGTTGA
GTCCGACAATACTTACATTGACCACAGTAGATGTTAGGGTCAACGGTTACACGATCACCTGGCTT
AACGTTAGTAACTTCTGAACCAACTTTTGTAACTACCCCTGAGTTTTCATGACCTAAAACGATAG
GAGGAACAGCTGATGCAGATCCCGGAAGACCGGCATAGAGCGCTTTATCAGTACCACAAATACCA
GCGTAGGCAGTATGAATTAAGACTTCATCAGGCTTAATTTCAGGTTCTTTAATATCTTCAATTTC
GAGTTGTTTTTTACCTGTTAAAACAAGTGCCTTCAT
Intervening sequence
(SEQ ID NO: 60)
AATTAAAATACCTCTCTTGTGAATTTTATCATTTGTCAAGTGATAGTATAGTGTGAAAACGCCTT
AATTGTCAAACGTCCAACAATTATCTCACATTCTTTTCGCCATCATAAAACGTTAAACTCAGCAA
ATCCGAACCTAAATAAATCCCGGTATAGAAGCATTTTCTAAAAAAGTGCAATTTTTAAATATTTT
TTTCTTCACTAAGTTTATGCTATTTTTTTGTTATCACATAAATGGTTTTACTTTCATTTTTTAAA
TTACATAATTTCACAAGGCTTTTTATCCTATTTAGCGTTTTACATCAAGAAATAAAATGTTTCTA
CATATAAAGTAATAAATTCTAAATTTATATAGAAAATTTCTCCAACTTTCAGAAAGCGCTTAACT
ACCATTAGGCACGCCAAAACTTATCTCCAACCGCTCCTCAAAATCGCCCAAATGGCCGTTATAAC
GGCTATTTTCCATTGCAGGATATATTTTTTTATGTTACCCTAACAAAGTATTCGAACTTAGTTAA
TTATGATTTCCAATCTAATTAACAAAACTCAAACGAAAGGTGGATTTGGC
mntH CDS
(SEQ ID NO: 61)
GTGGACGACACAAAGAATCAACACCGGAAGCATAAACTTATTGAATATGCTAACGGTAAATCACT
AGAGGAAATCAACGGAACAGTTGAAGTTCCTCGTGGAAAAGGCTTCTGGCGAACATTATTCGCTT
ACTCTGGTCCCGGTGCATTAGTTGCTGTGGGTTACATGGATCCAGGTAACTGGTCAACTTCAATT
ACTGGTGGACAGAGTTTCCAATATACCTTAATGACTACTATCTTGATTTCAAGTTTGATTGCGAT
GTTGCTTCAATACATGGCGGCTAAACTCGGAATCGTGAGCCAAATGGACCTTGCTCAGGCAACAC
GGGCACGTACCGGTAAAGCATTAGGTATTATCTTATGGATTATGACTGAGTTGGCGATTATGGCT
ACTGATATCGCTGAAGTTATCGGGGCTGCTATTGCTTTAAACTTACTGTTCCACATTCCGTTGAT
CCCATCTGTATTTATTACTGTTCTTGATGTTTTAGTACTGCTATTATTAACCAAGATCGGATTCC
GGAAGATTGAAGCAATTGTTGCATGTTTGATCTTGGTAATCTTGTTTGTTTTTGCTTACCAAGTT
GCCTTATCTAACCCTAACTGGGGTGGCGTATTTATGGGTCTCCTTCCATCAGCTAAGGCAATTGC
CCAACATCCAGAAATTAGTGGTATTACTCCATTAACTGGATCATTAGGTATTATCGGTGCGACTG
TTATGCCTCACAACCTATATCTCCACTCAGCAATTTCTCAAACTCGGAAGATTGACCACAATGAT
CTTGATAGCATTCGTCAAACTGTTCGTTTTACTACTTGGGATTCAAATATCCAATTATCCTTAGC
ATTTATTGTTAACGCCCTTCTTTTAATCATGGGGGTTGCTGTTTTCAAGACTGGTGCTGTTCAAG
ATAGTTCTTTCTTCGGTTTATATGATGCCCTGAATAACACTTCTATGCTTAGTAATCCAATCTTA
ATTGCGGTTGCTAAATCTGGTGTATTGTCAACTTTATTTGCAGTTGCTTTACTTGCCTCTGGTCA
AAATTCAACTATTACTGGAACATTAACCGGTCAAGTTATCATGGAAGGTTTCATTCATATGCGGA
TGCCTTTATGGGCACGACGGTTAGTTACCCGGATTATTTCCGTTATTCCAGTTATTGCTTGTGTT
GCTATGACGAGTGGTGAGAATACCATCCAACAACACACCGCCTTGAACCTTTTAATGGAAAATTC
ACAGGTATTCTTAGCTTTTGCCCTTCCATTCTCAATGTTGCCATTATTAATGATGACTAACAGTG
AGGTTGAAATGGGTGAATTTAAGAATAGTGGCTGGGTTAAGGCTTGCGGTTGGATCTCTGTAATT
GCCCTTACCTTCTTAAATCTCTACAACCTTCCTGCAACTTATGAAGGTTTTGGTATTTGGGCAAA
AGGGACATCCGATGTTCTCGCATATATCACGATTATTGTCATTCTTGCTCTTCTTATCTGGACTT
GTGTTGAACTCTACAAAGGGGATAAGCGCTTTGCTGCTGAAGGTAAAGGATTCGGACAACGTGAA
GCTCAAATGAAAGATTCAGCTGTAGAAGATTAA
Intervening sequence
(SEQ ID NO: 62)
AATAAAAACCTGGAAGCAATGCTCATGTACGGTAAAGAAGCAAGCAACCGAAAACAATAGATAGA
CCGCCAGCACTACACTATTCCGAACCAAAGACCAAAAGATAAGCATTTTGAGAAAATCTAAACTT
TTGGATTTTCCTACAATGCCGACTACGGCGGAATCCCTCCCACTCCTTATATATTTCTTTCTGTA
TACATTAAATTTGTATTTAGTAAAATGCAGACAACACCACGGATCGGCTTTTGGCTGGACAATTC
CAACCAAACACCGCAGCAGACAGTAGAAACCATTCTGAACGTTAGGAAGCCGGTATGATTGTTAC
ATATAAGGGGAAGAAAAATTTCTTTTAGATACTTGTTTTCCTAAAACTGATGTGATATAATAATT
CAATTCCAGAAAAGGAGTAAAAAATATGCGGCAAGTTATTCTTAAATAAAACTATAATCAAATAG
TGGGAACAAAGGATTATGATAGTCCCTTTTGTAGGGGCTTAGTTTTTTGTACCCAATTTAAGAAT
ACTTTTGCCTTATCAATTTTGACATATCCCCAAAAACAGCACTCACAAACAGGTGTATGCTGTAT
ATGTGTATGTCCGCAAATTATCATCCCCAGTGGTAAAAGTATTTTACTGCTGGGGATTTTTATGC
CCTTCGGGGCAGTAAAGGGAGGACAATCAC
tetW CDS
(SEQ ID NO: 63)
ATGAAAATAATCAATATTGGAATTCTTGCCCATGTAGACGCTGGAAAGACGACCTTGACGGAGAG
CCTGCTATATGCCAGCGGAGCCATTTCAGAACCGGGGAGCGTCAAAAAAGGGACAACGAGGACGG
ACACCATGTTTTTGGAGCGGCAGCGTGGGATTACCATTCAAGCGGCAGTCACTTCCTTCCAGTGG
CACAGATGTAAAGTCAACATTGTGGATACGCCCGGCCACATGGATTTTTTGGCGGAGGTGTACCG
CTCTTTGGCTGTTTTAGATGGGGCCATCTTGGTGATCTCCGCTAAAGATGGCGTGCAGGCCCAGA
CCCGTATTCTGTTCCATGCCCTGCGGAAAATGAACATTCCCACCGTTATCTTTATCAACAAGATC
GACCAGGCTGGCGTTGATTTGCAGAGCGTGGTTCAGTCTGTTCGGGATAAGCTCTCCGCCGATAT
TATCATCAAGCAGACGGTGTCGCTGTCCCCGGAAATAGTCCTGGAGGAAAATACCGACATAGAAG
CATGGGATGCGGTCATCGAAAATAACGATAAATTATTGGAAAAGTATATCGCAGGAGAACCAATC
AGCCGGGAAAAACTTGTGCGGGAGGAACAGCGGCGGGTTCAAGACGCCTCCCTGTTCCCGGTCTA
TTATGGCAGCGCCAAAAAGGGCCTTGGCATTCAACCGTTGATGGATGCGGTGACAGGGCTGTTCC
AACCGATTGGGGAACAGGGGAGCGCCGCCCTATGCGGCAGCGTTTTCAAGGTGGAGTATACAGAT
TGCGGCCAGCGGCGTGTCTATCTACGGCTATACAGCGGAACGCTGCGCCTGCGGGATACGGTGGC
CCTGGCCGGGAGAGAAAAGCTGAAAATCACAGAGATGCGTATTCCATCCAAAGGGGAAATTGTTC
GGACAGACACCGCTTATCCGGGTGAAATTGTTATCCTTCCCAGCGACAGCGTGAGGTTAAACGAT
GTATTAGGGGACCCAACCCGGCTCCCTCGTAAAAGGTGGCGTGAGGACCCCCTCCCCATGCTGCG
GACGTCGATTGCGCCGAAAACGGCAGCGCAAAGAGAACGGCTGCTGGACGCTCTTACGCAACTTG
CGGATACTGACCCGCTTTTGCGCTGCGAGGTGGATTCCATCACCCATGAGATCATTCTTTCTTTT
TTGGGCCGGGTGCAGTTGGAGGTTGTTTCCGCTTTGCTGTCGGAAAAATACAAGCTTGAAACAGT
GGTAAAGGAACCCACCGTCATTTATAAGGAGCGGCCGCTCAAAGCAGCCAGCCACACCATCCATA
TCGAGGTGCCGCCCAACCCGTTTTGGGCATCCATCGGACTGTCTGTTACACCACTCCCGCTTGGC
TCCGGTGTACAATACGAGAGCCGGGTTTCGCTGGGATACTTGAACCAGAGTTTTCAAAACGCTGT
CAGGGATGGTATCCGTTACGGGCTGGAGCAGGGCTTGTTCGGCTGGAACGTAACGGACTGTAAGA
TTTGCTTTGAATACGGGCTTTATTACAGTCCGGTCAGCACGCCGGCGGACTTCCGCTCATTGGCC
CCGATTGTATTGGAACAGGCATTGAAGGAATCAGGGACGCAACTGCTGGAACCTTATCTCTCCTT
CACCCTCTATGCGCCCCGGGAATATCTTTCCAGGGCTTATCATGATGCACCGAAATACTGTGCCA
CCATCGAAACGGTCCAGGTAAAAAAGGATGAAGTTGTCTTTACTGGCGAGATTCCCGCCCGCTGT
ATACAGGCATACCGTACTGATCTGGCCTTTTACACCAACGGGCAGAGCGTATGCCTTACAGAACT
GAAAGGGTATCAGGCCGCTGACGGCAAGCCAGTCATCCAGCCCCGCCGTCCAAACAGCCGCCTGG
ACAAGGTGCGCTATATGTTTCAGAAGATAATGTAA
Intervening sequence
(SEQ ID NO: 64)
CTGCTTCCAGTTTTTTATTTTTGTAACGATTCTTTCACAAAATGTTCATACTTGAACGGTATAGT
ATAGACAATCCCTAATATAAATAAACCCCTATTTTTCTTCTATACTATCCCCCTCAAAATAGCTA
TGAAGAAATACGAAAAGTGGTCGGCCCATAATGAGTCGGCCATTTTTTAATACATCTAGGCTCAC
CATGGTATAATAAGGAACTAGATATATTACTCATTAAGTATGAGGTGAAATCA
Hypothetical protein coding sequence CDS
(SEQ ID NO: 65)
TTGAATAATAAAGATAATAATCAAAATAATAATAAGCGGCGACCTACTCGGGTTGAGCTTTATGA
CACTCCTAAGCCAGGAAAAGAAAAGAAAAAACGTTCTTTCTTTAATCGTCAGCCTAAACAGACTA
CCCCTAACCATAAACATAAGACAGCATCCCCTAACAAGAAAAAGAATCCATATGGAATTTCACGT
CGGATGTTCAAGGTCATTTTAGGCTGCCTATTAGTTATCTTAATTGCAACCATTGTTATTTTCTT
AGTTAAACAACAGGACCCTGTCAATGTTGATAGCAATGACACTACTGTCTCCACAAGCACTTCAT
CACGCAAGAAGCATAAAAAGAGCAGCAGTAGCAGTCATAAGCATCGTTCAAGTTCCAATGACAGT
GATGACAATGATACTCAAGATACTTATAGTATTTCAACTCCTAGTCGTTCGGATAACACGCCTCA
ATCAAGTCATCCAACTAACCAACAACCAACTACTAACTCTTCTTCAACTCCACAACAAAACCAAC
CATCGCAGGAAGAACACCATGATCAAGGCAACAGCCAACAACAATCTACTTCACAACCAGCAAGC
AGCAATTCTGGGTCACAGCCTAATCAAAGTTCGCAAAGTACTAGTTCCCAGTCAAACCCGCAACC
AGTTCAACCTCATTCTCAAAATAATCAGCATTAA
Intervening sequence
(SEQ ID NO: 66)
TTTGGAATAAAGGGGTTGTCAATTAAAGTGGGCGTGCTATAATCAAGACAATCGATTGAAGGATA
TGCACCTTCAAAGTCCTCTACAGAGAGTAAGTGCCTTGAGTGGAAGCACTTGTGAGTGACAATGA
TGGTTGTACCACCTTCCCTTATTATTAGCCGAGATAAGGCTAGTCGGATCGTGTCCGTTACCGCA
CCTTAGAGAGGACATTACTAGTGTGTCCTAAAGATGGGTGGAACCACGCTAATTTTTGTTAATTG
ACGTCCCTGATACTTTCAACATTGAAAGTATCAGGGACGTTTTTATTTATATTAAAGGAGAGATT
TCT
thrS CDS
(SEQ ID NO: 67)
ATGGCTCAGGTTGCTGTTATGTCCCCAGATGGATCAGTTAAGAAGATCGATCGGGATTCACAAGA
AAGTTTAGAAGCATTACGTAAGCTTTCTGCATTAATGTTAAAGGCTGCATTAAAACAAGAATTTA
AGGGTATTCGACTTGGTGAAGCTGTCGCTGACGAAGATGGTTTCCACGTTGATTCTGATAAAGAT
AATCAACAAGTTTCTGCCGACGAATTACCAGCTCTTGAAGACGTAATCAAGGGAATGGCAAAGAA
CGATGTTAAGGTAGAATTTGTTGAAGTACCTGTAGAGGAAGCACTTGCCGAAGTAAAAGATGATC
GTTTCTCAACTGAATTGATCAATGAAAATGCTAAAGACGGCAAAGTAGCAATGTACCAACTTGGT
GATGTCAAAGCTGTTGCAGATGATGACATTCTTTTATATGGTAACGTTGTTAAAAACTTACGCCT
TCTTTCTGTTGCTGGTGCTTACTGGAAAGGTATGTCTTCAAATCCAATGCTTCAACGGATTTACG
GAACTGTCTTCTACAAGAAGGACGCATTAGAAGAAGACTTAAAGAAACGTCAAGAAGCTAAGGAA
CGTGACCACCGTGTTATCGGTAACCAACTCGACCTCTTCTTTGTTGATCCTAAGGTTGGTGCCGG
TTTACCATACTGGTTACCAAAAGGTGCTACTATTCGCCGGACAATCGAACGTTACATCATTGACC
GGGAAGTTGCCGATGGTTACCAACACGTTTATACTCCAGTCCTAATGAATCTTGATGCCTACAAG
ACTTCTGGTCACTGGGAACACTACCGCGACGATATGTTCCCACCAATGGACATGGGTGATGGCGA
AATGCTTGAATTACGGCCAATGAACTGCCCAAGCCATATTCAAGTTTACAAGCACCATATTCGTT
CATACCGTGATCTCCCATTACGAATTGCTGAACTTGGTATGATGCACCGTTATGAAAAATCAGGT
GCTCTTTCTGGTCTTCAACGTGTTCGTGAAATGACTTTGAACGATGGCCACACTTTCGTTACCCT
TGACCAAATTCGTTCTGAATTCGCAAAGATTTTGAAGTTGATCATGAGCGTTTACGAAGACTTTG
ATATTACTGACTACAGCTTCCGTCTTTCTCTTCGTGACCCTAAGAACGTTAAGAAGTACTATGCT
AATGACGAAATGTGGGAAAAATCCCAATCAATGTTGAAATCAGCAATGGACGATCTTAACCTTGA
TTATTATGAAGCTGAAGGTGAAGCTGCCTTCTATGGTCCAAAACTTGATATTCAAACTAAGACTG
CTCTTGGGAATGACGAAACAATGTCAACTATTCAACTTGACTTTATGCTTCCAGAACGATTCGGA
CTTTCCTACGTTGGTCAAGACGGTAAAGAACATCAACCAGTTATGATTCACCGTGGTGTTGTTGG
AACAATGGAACGGTTCATGGCTTACTTAACAGAAATTTACAAGGGTGCATTCCCAACTTGGTTAG
CCCCAGAACAAGTCCACATTATCCCTGTTAACGAAGAAGCCCATGGTGAATACGCAGATAACCTC
GCTAAGAAGATGAAGGCTGCTAACATTCGGGTTAATGTTGACCACCGAAATGAAAAGATGGGCTA
CAAGATTCGTGAAGCTCAAACACAAAAGGTTCCATACACTCTTGTTGTTGGAGACGATGAAAAGA
ATAACAATGGTGTATCTGTTCGTAAGTACGGTGAAAAGGAACAAAATGAAATGAGTCAAGAAGCA
TTTATGAATGAAATTCTTGAAGATATTGCTTCTTACTCCCGTGAAAAGTAA
> L. reuteri PTA-126788 (strain 3632) tetW sequence
along with flanking gene sequences
tdh CDS
(SEQ ID NO: 68)
TTAAGCTTCTTCGCCGCCAACCTTAACAACAGCTTTTGAAACCTTACCTAATTTACCACTAACAA
AGTCTTCAACACCATCAAGGTCTAATTCGTGTGAGAAGAGTGGTAGTGGGTCAACAACACCAGAA
GAAAGAAGTGCAATTGAGTCTTCAAAAGTGTAAGGGTTAATGAAGGCCCCTTGAATTGTAAGTTG
TTTTTGGAATACATCGTAAGTGTTTACTGAGAACTTGTCATCAGGGTTACCAACACCAAACATTA
ATACTTGAGCACCACGAGCTGCAGCTGCAAGTGCTTGTTCTTGAGTAGCTGGCAAACCAACCGCT
TCAACAACGATGTCATATGCATCAGCAGGAATTTCTTCCTTAGTAGTGTTGATAGTCTTAACGCC
GAAGTGCTTCCGGTTGTTTTCCAACTTTTCATCTGAACGACCAGCTAAAGTAACTTCGTGAATAC
CACGAGCCTTCAAGATTTGTGCAAATAATTGACCTTCAAAACCATCACCTAATACTAAAGCCTTT
TGGTATGGGTGAGTTTCAAGTAAGTCAACACCGTGCATTGCACATGAAATTGGTTCAACAACGGC
AGCTGCCTTTAATGAAACATCATCAGGAATTGGGTAAACAACTTTTGCAGGAGCAGTAAAGTATT
CTTCAAAACCACCGTTACGGGTAACACCAACAGCATCAAGGTGTTCACATAATTCTGGGCGTTGA
GTCCGACAATACTTACATTGACCACAGTAGATGTTAGGGTCAACGGTTACACGATCACCTGGCTT
AACGTTAGTAACTTCTGAACCAACTTTTGTAACTACCCCTGAGTTTTCATGACCTAAAACGATAG
GAGGAACAGCTGATGCAGATCCCGGAAGACCGGCATAGAGCGCTTTATCAGTACCACAAATACCA
GCGTAGGCAGTATGAATTAAGACTTCATCAGGCTTAATTTCAGGTTCTTTAATATCTTCAATTTC
GAGTTGTTTTTTACCTGTTAAAACAAGTGCCTTCAT
intervening sequence
(SEQ ID NO: 69)
AATTAAAATACCTCTCTTGTGAATTTTATCATTTGTCAAGTGATAGTATAGTGTGAAAACGCCTT
AATTGTCAAACGTCCAACAATTATCTCACATTCTTTTCGCCATCATAAAACGTTAAACTCAGCAA
ATCCGAACCTAAATAAATCCCGGTATAGAAGCATTTTCTAAAAAAGTGCAATTTTTAAATATTTT
TTTCTTCACTAAGTTTATGCTATTTTTTTGTTATCACATAAATGGTTTTACTTTCATTTTTTAAA
TTACATAATTTCACAAGGCTTTTTATCCTATTTAGCGTTTTACATCAAGAAATAAAATGTTTCTA
CATATAAAGTAATAAATTCTAAATTTATATAGAAAATTTCTCCAACTTTCAGAAAGCGCTTAACT
ACCATTAGGCACGCCAAAACTTATCTCCAACCGCTCCTCAAAATCGCCCAAATGGCCGTTATAAC
GGCTATTTTCCATTGCAGGATATATTTTTTTATGTTACCCTAACAAAGTATTCGAACTTAGTTAA
TTATGATTTCCAATCTAATTAACAAAACTCAAACGAAAGGTGGATTTGGC
mntH CDS
(SEQ ID NO: 70)
GTGGACGACACAAAGAATCAACACCGGAAGCATAAACTTATTGAATATGCTAACGGTAAATCACT
AGAGGAAATCAACGGAACAGTTGAAGTTCCTCGTGGAAAAGGCTTCTGGCGAACATTATTCGCTT
ACTCTGGTCCCGGTGCATTAGTTGCTGTGGGTTACATGGATCCAGGTAACTGGTCAACTTCAATT
ACTGGTGGACAGAGTTTCCAATATACCTTAATGACTACTATCTTGATTTCAAGTTTGATTGCGAT
GTTGCTTCAATACATGGCGGCTAAACTCGGAATCGTGAGCCAAATGGACCTTGCTCAGGCAACAC
GGGCACGTACCGGTAAAGCATTAGGTATTATCTTATGGATTATGACTGAGTTGGCGATTATGGCT
ACTGATATCGCTGAAGTTATCGGGGCTGCTATTGCTTTAAACTTACTGTTCCACATTCCGTTGAT
CCCATCTGTATTTATTACTGTTCTTGATGTTTTAGTACTGCTATTATTAACCAAGATCGGATTCC
GGAAGATTGAAGCAATTGTTGCATGTTTGATCTTGGTAATCTTGTTTGTTTTTGCTTACCAAGTT
GCCTTATCTAACCCTAACTGGGGTGGCGTATTTATGGGTCTCCTTCCATCAGCTAAGGCAATTGC
CCAACATCCAGAAATTAGTGGTATTACTCCATTAACTGGATCATTAGGTATTATCGGTGCGACTG
TTATGCCTCACAACCTATATCTCCACTCAGCAATTTCTCAAACTCGGAAGATTGACCACAATGAT
CTTGATAGCATTCGTCAAACTGTTCGTTTTACTACTTGGGATTCAAATATCCAATTATCCTTAGC
ATTTATTGTTAACGCCCTTCTTTTAATCATGGGGGTTGCTGTTTTCAAGACTGGTGCTGTTCAAG
ATAGTTCTTTCTTCGGTTTATATGATGCCCTGAATAACACTTCTATGCTTAGTAATCCAATCTTA
ATTGCGGTTGCTAAATCTGGTGTATTGTCAACTTTATTTGCAGTTGCTTTACTTGCCTCTGGTCA
AAATTCAACTATTACTGGAACATTAACCGGTCAAGTTATCATGGAAGGTTTCATTCATATGCGGA
TGCCTTTATGGGCACGACGGTTAGTTACCCGGATTATTTCCGTTATTCCAGTTATTGCTTGTGTT
GCTATGACGAGTGGTGAGAATACCATCCAACAACACACCGCCTTGAACCTTTTAATGGAAAATTC
ACAGGTATTCTTAGCTTTTGCCCTTCCATTCTCAATGTTGCCATTATTAATGATGACTAACAGTG
AGGTTGAAATGGGTGAATTTAAGAATAGTGGCTGGGTTAAGGCTTGCGGTTGGATCTCTGTAATT
GCCCTTACCTTCTTAAATCTCTACAACCTTCCTGCAACTTATGAAGGTTTTGGTATTTGGGCAAA
AGGGACATCCGATGTTCTCGCATATATCACGATTATTGTCATTCTTGCTCTTCTTATCTGGACTT
GTGTTGAACTCTACAAAGGGGATAAGCGCTTTGCTGCTGAAGGTAAAGGATTCGGACAACGTGAA
GCTCAAATGAAAGATTCAGCTGTAGAAGATTAA
intervening sequence
(SEQ ID NO: 71)
AATAAAAACCTGGAAGCAATGCTCATGTACGGTAAAGAAGCAAGCAACCGAAAACAATAGATAGA
CCGCCAGCACTACACTATTCCGAACCAAAGACCAAAAGATAAGCATTTTGAGAAAATCTAAACTT
TTGGATTTTCCTACAATGCCGACTACGGCGGAATCCCTCCCACTCCTTATATATTTCTTTCTGTA
TACATTAAATTTGTATTTAGTAAAATGCAGACAACACCACGGATCGGCTTTTGGCTGGACAATTC
CAACCAAACACCGCAGCAGACAGTAGAAACCATTCTGAACGTTAGGAAGCCGGTATGATTGTTAC
ATATAAGGGGAAGAAAAATTTCTTTTAGATACTTGTTTTCCTAAAACTGATGTGATATAATAATT
CAATTCCAGAAAAGGAGTAAAAAATATGCGGCAAGTTATTCTTAAATAAAACTATAATCAAATAG
TGGGAACAAAGGATTATGATAGTCCCTTTTGTAGGGGCTTAGTTTTTTGTACCCAATTTAAGAAT
ACTTTTGCCTTATCAATTTTGACATATCCCCAAAAACAGCACTCACAAACAGGTGTATGCTGTAT
ATGTGTATGTCCGCAAATTATCATCCCCAGTGGTAAAAGTATTTTACTGCTGGGGATTTTTATGC
CCTTCGGGGCAGTAAAGGGAGGACAATCAC
tetW CDS
(SEQ ID NO: 72)
ATGAAAATAATCAATATTGGAATTCTTGCCCATGTAGACGCTGGAAAGACGACCTTGACGGAGAG
CCTGCTATATGCCAGCGGAGCCATTTCAGAACCGGGGAGCGTCAAAAAAGGGACAACGAGGACGG
ACACCATGTTTTTGGAGCGGCAGCGTGGGATTACCATTCAAGCGGCAGTCACTTCCTTCCAGTGG
CACAGATGTAAAGTCAACATTGTGGATACGCCCGGCCACATGGATTTTTTGGCGGAGGTGTACCG
CTCTTTGGCTGTTTTAGATGGGGCCATCTTGGTGATCTCCGCTAAAGATGGCGTGCAGGCCCAGA
CCCGTATTCTGTTCCATGCCCTGCGGAAAATGAACATTCCCACCGTTATCTTTATCAACAAGATC
GACCAGGCTGGCGTTGATTTGCAGAGCGTGGTTCAGTCTGTTCGGGATAAGCTCTCCGCCGATAT
TATCATCAAGCAGACGGTGTCGCTGTCCCCGGAAATAGTCCTGGAGGAAAATACCGACATAGAAG
CATGGGATGCGGTCATCGAAAATAACGATAAATTATTGGAAAAGTATATCGCAGGAGAACCAATC
AGCCGGGAAAAACTTGTGCGGGAGGAACAGCGGCGGGTTCAAGACGCCTCCCTGTTCCCGGTCTA
TTATGGCAGCGCCAAAAAGGGCCTTGGCATTCAACCGTTGATGGATGCGGTGACAGGGCTGTTCC
AACCGATTGGGGAACAGGGGAGCGCCGCCCTATGCGGCAGCGTTTTCAAGGTGGAGTATACAGAT
TGCGGCCAGCGGCGTGTCTATCTACGGCTATACAGCGGAACGCTGCGCCTGCGGGATACGGTGGC
CCTGGCCGGGAGAGAAAAGCTGAAAATCACAGAGATGCGTATTCCATCCAAAGGGGAAATTGTTC
GGACAGACACCGCTTATCCGGGTGAAATTGTTATCCTTCCCAGCGACAGCGTGAGGTTAAACGAT
GTATTAGGGGACCCAACCCGGCTCCCTCGTAAAAGGTGGCGTGAGGACCCCCTCCCCATGCTGCG
GACGTCGATTGCGCCGAAAACGGCAGCGCAAAGAGAACGGCTGCTGGACGCTCTTACGCAACTTG
CGGATACTGACCCGCTTTTGCGCTGCGAGGTGGATTCCATCACCCATGAGATCATTCTTTCTTTT
TTGGGCCGGGTGCAGTTGGAGGTTGTTTCCGCTTTGCTGTCGGAAAAATACAAGCTTGAAACAGT
GGTAAAGGAACCCACCGTCATTTATAAGGAGCGGCCGCTCAAAGCAGCCAGCCACACCATCCATA
TCGAGGTGCCGCCCAACCCGTTTTGGGCATCCATCGGACTGTCTGTTACACCACTCCCGCTTGGC
TCCGGTGTACAATACGAGAGCCGGGTTTCGCTGGGATACTTGAACCAGAGTTTTCAAAACGCTGT
CAGGGATGGTATCCGTTACGGGCTGGAGCAGGGCTTGTTCGGCTGGAACGTAACGGACTGTAAGA
TTTGCTTTGAATACGGGCTTTATTACAGTCCGGTCAGCACGCCGGCGGACTTCCGCTCATTGGCC
CCGATTGTATTGGAACAGGCATTGAAGGAATCAGGGACGCAACTGCTGGAACCTTATCTCTCCTT
CACCCTCTATGCGCCCCGGGAATATCTTTCCAGGGCTTATCATGATGCACCGAAATACTGTGCCA
CCATCGAAACGGTCCAGGTAAAAAAGGATGAAGTTGTCTTTACTGGCGAGATTCCCGCCCGCTGT
ATACAGGCATACCGTACTGATCTGGCCTTTTACACCAACGGGCAGAGCGTATGCCTTACAGAACT
GAAAGGGTATCAGGCCGCTGACGGCAAGCCAGTCATCCAGCCCCGCCGTCCAAACAGCCGCCTGG
ACAAGGTGCGCTATATGTTTCAGAAGATAATGTAA
intervening sequence
(SEQ ID NO: 73)
CTGCTTCCAGTTTTTTATTTTTGTAACGATTCTTTCACAAAATGTTCATACTTGAACGGTATAGT
ATAGACAATCCCTAATATAAATAAACCCCTATTTTTCTTCTATACTATCCCCCTCAAAATAGCTA
TGAAGAAATACGAAAAGTGGTCGGCCCATAATGAGTCGGCCATTTTTTAATACATCTAGGCTCAC
CATGGTATAATAAGGAACTAGATATATTACTCATTAAGTATGAGGTGAAATCA
hypothetical protein CDS
(SEQ ID NO: 74)
TTGAATAATAAAGATAATAATCAAAATAATAATAAGCGGCGACCTACTCGGGTTGAGCTTTATGA
CACTCCTAAGCCAGGAAAAGAAAAGAAAAAACGTTCTTTCTTTAATCGTCAGCCTAAACAGACTA
CCCCTAACCATAAACATAAGACAGCATCCCCTAACAAGAAAAAGAATCCATATGGAATTTCACGT
CGGATGTTCAAGGTCATTTTAGGCTGCCTATTAGTTATCTTAATTGCAACCATTGTTATTTTCTT
AGTTAAACAACAGGACCCTGTCAATGTTGATAGCAATGACACTACTGTCTCCACAAGCACTTCAT
CACGCAAGAAGCATAAAAAGAGCAGCAGTAGCAGTCATAAGCATCGTTCAAGTTCCAATGACAGT
GATGACAATGATACTCAAGATACTTATAGTATTTCAACTCCTAGTCGTTCGGATAACACGCCTCA
ATCAAGTCATCCAACTAACCAACAACCAACTACTAACTCTTCTTCAACTCCACAACAAAACCAAC
CATCGCAGGAAGAACACCATGATCAAGGCAACAGCCAACAACAATCTACTTCACAACCAGCAAGC
AGCAATTCTGGGTCACAGCCTAATCAAAGTTCGCAAAGTACTAGTTCCCAGTCAAACCCGCAACC
AGTTCAACCTCATTCTCAAAATAATCAGCATTAA
intervening sequence
(SEQ ID NO: 75)
TTTGGAATAAAGGGGTTGTCAATTAAAGTGGGCGTGCTATAATCAAGACAATCGATTGAAGGATA
TGCACCTTCAAAGTCCTCTACAGAGAGTAAGTGCCTTGAGTGGAAGCACTTGTGAGTGACAATGA
TGGTTGTACCACCTTCCCTTATTATTAGCCGAGATAAGGCTAGTCGGATCGTGTCCGTTACCGCA
CCTTAGAGAGGACATTACTAGTGTGTCCTAAAGATGGGTGGAACCACGCTAATTTTTGTTAATTG
ACGTCCCTGATACTTTCAACATTGAAAGTATCAGGGACGTTTTTATTTATATTAAAGGAGAGATT
TCT
thrS CDS
(SEQ ID NO: 76)
ATGGCTCAGGTTGCTGTTATGTCCCCAGATGGATCAGTTAAGAAGATCGATCGGGATTCACAAGA
AAGTTTAGAAGCATTACGTAAGCTTTCTGCATTAATGTTAAAGGCTGCATTAAAACAAGAATTTA
AGGGTATTCGACTTGGTGAAGCTGTCGCTGACGAAGATGGTTTCCACGTTGATTCTGATAAAGAT
AATCAACAAGTTTCTGCCGACGAATTACCAGCTCTTGAAGACGTAATCAAGGGAATGGCAAAGAA
CGATGTTAAGGTAGAATTTGTTGAAGTACCTGTAGAGGAAGCACTTGCCGAAGTAAAAGATGATC
GTTTCTCAACTGAATTGATCAATGAAAATGCTAAAGACGGCAAAGTAGCAATGTACCAACTTGGT
GATGTCAAAGCTGTTGCAGATGATGACATTCTTTTATATGGTAACGTTGTTAAAAACTTACGCCT
TCTTTCTGTTGCTGGTGCTTACTGGAAAGGTATGTCTTCAAATCCAATGCTTCAACGGATTTACG
GAACTGTCTTCTACAAGAAGGACGCATTAGAAGAAGACTTAAAGAAACGTCAAGAAGCTAAGGAA
CGTGACCACCGTGTTATCGGTAACCAACTCGACCTCTTCTTTGTTGATCCTAAGGTTGGTGCCGG
TTTACCATACTGGTTACCAAAAGGTGCTACTATTCGCCGGACAATCGAACGTTACATCATTGACC
GGGAAGTTGCCGATGGTTACCAACACGTTTATACTCCAGTCCTAATGAATCTTGATGCCTACAAG
ACTTCTGGTCACTGGGAACACTACCGCGACGATATGTTCCCACCAATGGACATGGGTGATGGCGA
AATGCTTGAATTACGGCCAATGAACTGCCCAAGCCATATTCAAGTTTACAAGCACCATATTCGTT
CATACCGTGATCTCCCATTACGAATTGCTGAACTTGGTATGATGCACCGTTATGAAAAATCAGGT
GCTCTTTCTGGTCTTCAACGTGTTCGTGAAATGACTTTGAACGATGGCCACACTTTCGTTACCCT
TGACCAAATTCGTTCTGAATTCGCAAAGATTTTGAAGTTGATCATGAGCGTTTACGAAGACTTTG
ATATTACTGACTACAGCTTCCGTCTTTCTCTTCGTGACCCTAAGAACGTTAAGAAGTACTATGCT
AATGACGAAATGTGGGAAAAATCCCAATCAATGTTGAAATCAGCAATGGACGATCTTAACCTTGA
TTATTATGAAGCTGAAGGTGAAGCTGCCTTCTATGGTCCAAAACTTGATATTCAAACTAAGACTG
CTCTTGGGAATGACGAAACAATGTCAACTATTCAACTTGACTTTATGCTTCCAGAACGATTCGGA
CTTTCCTACGTTGGTCAAGACGGTAAAGAACATCAACCAGTTATGATTCACCGTGGTGTTGTTGG
AACAATGGAACGGTTCATGGCTTACTTAACAGAAATTTACAAGGGTGCATTCCCAACTTGGTTAG
CCCCAGAACAAGTCCACATTATCCCTGTTAACGAAGAAGCCCATGGTGAATACGCAGATAACCTC
GCTAAGAAGATGAAGGCTGCTAACATTCGGGTTAATGTTGACCACCGAAATGAAAAGATGGGCTA
CAAGATTCGTGAAGCTCAAACACAAAAGGTTCCATACACTCTTGTTGTTGGAGACGATGAAAAGA
ATAACAATGGTGTATCTGTTCGTAAGTACGGTGAAAAGGAACAAAATGAAATGAGTCAAGAAGCA
TTTATGAATGAAATTCTTGAAGATATTGCTTCTTACTCCCGTGAAAAGTAA

[0399] During carbohydrate fermentation, Lactobacillus species are known to produce either exclusively L-lactic acid, exclusively D-lactic acid or a racemic mix of L- and D-lactic acid (80). Many commercially used Lactobacillus species produce a racemic mix of L- and D-lactic acid, including the most widely used L. reuteri probiotic strains DSM 17938 and NCIMB 30242 (81-84). Screening for D-lactic acid has gained much attention due to D-lactic acidosis and encephalopathy reported in individuals with short bowel syndrome and intestinal failure (85-87). However, such illnesses have not yet been reported in healthy individuals. Quantification of L- and D-lactic acid showed that our strains produce a racemic mix of L- and D-lactic acid with predominance of L-lactic acid. Consistent with the previous reports, DSM 17938 also produced a racemic mix of D- and L-lactic acid (81). NCIMB 30242, another widely used L. reuteri probiotic strain, also produces a racemic mix of D- and L-lactic acid in a ratio of 9:11 (55). Many clinical studies conducted on DSM 17938 and NCIMB 30242 in infants, children and adults showed no evidence of adverse effects from D-lactic acidosis (26).

[0400] Lactobacillus species also possess amino acid decarboxylase activity, which results in production of toxic metabolites such as histamine, tyramine, cadaverine and putrescine. Toxicity from biogenic amines are rare but when reported is mostly associated with histamine and less commonly with tyramine (88-90). Genome analysis showed that our strains do not encode for any known genes encoding for histamine or tyramine production. Analysis of the strains for their ability to produce biogenic amines using decarboxylase media developed by Bover-Cid and Holzapfei (56) showed that our strains are not capable of producing histamine or tyramine. The data clearly suggest that our strains do not produce the two major biogenic amines associated with toxicity in humans—histamine, and tyramine.

[0401] Our bioinformatic search identified a CDS predicted to encode arginine deiminase in both L. reuteri PTA-126787 and PTA-126788. Arginine deiminase is a common enzyme present in most lactic acid bacteria and is used to convert arginine into ornithine via citrulline and allows bacteria to adapt to non-optimal stress conditions such as acid, osmotic and temperature stresses (91). Expectedly, a gene encoding arginine deiminase was also present in the genome of the commercially marketed L. reuteri strain DSM 17938 (Accession no. WP_003670382.1). Our bioinformatics analysis showed that the downstream gene ornithine decarboxylase required for putrescine production is absent in the genomes of L. reuteri PTA-126787 and PTA-126788. Consistent with this, in vitro analysis of biogenic amines using decarboxylase media showed that our strains are not capable of producing putrescine using L-ornithine as a substrate. Thus, the presence of arginine deiminase may not result in production of the harmful biogenic amine putrescine.

[0402] Studies on the survival properties of probiotic candidates in simulated gastrointestinal conditions are key to our understanding of their safety and efficacy. Probiotic candidates are exposed to a variety of harsh extremes in the gastrointestinal tract, but acidic pH of the stomach and bile salts appear to be the dominant factors determining the survival and growth of probiotic candidates in the gastrointestinal tract. The chicken duodenum has a typical bile salt concentration of 0.175% and likewise, the human duodenum has a bile salt concentration of around 0.3% (92, 93). Both of our L. reuteri strains showed a similar survival profile to that of commercially marketed probiotic L. reuteri DSM 17938 in the presence of 0.3% bile salts. The human and chicken (proventriculus) stomachs have a pH of around 1.5-4.0 (94, 95). Both of our strains showed similar survival at pH 2.5, similar to DSM 17938. Together, these data suggest that the two probiotic candidates possess desirable survival properties in a simulated gastrointestinal environment.

[0403] In the present study, broiler chickens (SPF White Leghorn chickens) were used as a model for preliminary screening of L. reuteri PTA-126787 and PTA-126788 strains for gross safety parameters. Our data showed that daily administration of the two L. reuteri strains for 26 days to chickens was safe and did not induce any adverse events. The data provided here serves as a preliminary safety evidence of the two probiotic candidates for potential animal health applications. Future studies will focus on further safety evaluation of the two strains in a rat toxicity model for potential human health applications.

[0404] In conclusion, we provide comprehensive genomic, in vitro, and in vivo evidence to support the safety of two novel L. reuteri candidates, PTA-126787 and PTA-126788. These findings would serve as the basis for designing future studies to establish efficacy in humans as well as animals.

### REFERENCES

[0405] 1. FAO/WHO. Guidelines for the evaluation of probiotics in food report of a joint FAO/WHO working group on drafting guidelines for the evaluation of probiotics in food. London Ontario, Canada: World Health Organization. 2002.
[0406] 2. Hill C, Guarner F, Reid G, Gibson G R, Merenstein D J, Pot B, et al. Expert consensus document. The International Scientific Association for Probiotics and Prebiotics consensus statement on the scope and appropriate use of the term probiotic. Nat Rev Gastroenterol Hepatol. 2014; 11(8):506-14.
[0407] 3. Vandenplas Y, Huys G, Daube G. Probiotics: An update. J Pediatr (Rio J). 2015; 91(1):6-21.
[0408] 4. Aggarwal J, Swami G, Kumar M. Probiotics and their effects on metabolic diseases: An update. J Clin Diagn Res. 2013; 7(1):173-7.
[0409] 5. Zoumpopoulou G, Tzouvanou A, Mavrogonatou E, Alexandraki V, Georgalaki M, Anastasiou R, et al. Probiotic features of lactic acid bacteria isolated from a diverse pool of traditional Greek dairy products regarding specific strain-host interactions. Probiotics Antimicrob Proteins. 2018; 10(2):313-22.
[0410] 6. Beijerinck M W. Sur les ferments lactiques de l'industrie. Archives Neerlandaises des Sciences Exactes et Naturelles. 1901(6):212-43.
[0411] 7. Bourdichon F, Casaregola S, Farrokh C, Frisvad J C, Gerds M L, Hammes W P, et al. Food fermentations: microorganisms with technological beneficial use. Int J Food Microbiol. 2012; 154(3):87-97.
[0412] 8. Fuller R. Probiotics in man and animals. J Appl Bacteriol. 1989; 66(5):365-78.
[0413] 9. Reuter G. Das vorkommen von laktobazillen in lebensmitteln und ihr verhalten im menschlichen intestinaltrakt. ZBL Bak Parasit Infec Hyg I Orig. 1965; 197:468-87.
[0414] 10. Kandler O, Stetter K-O, Kohl R. Lactobacillus reuteri sp. nov., a new species of heterofermentative lactobacilli. Zentralblatt für Bakteriologie: I Abt Originale C: Allgemeine, angewandte und ökologische Mikrobiologie. 1980; 1(3):264-9.
[0415] 11. Casas I A, Dobrogosz W J. Validation of the probiotic concept: Lactobacillus reuteri confers broad-spectrum protection against disease in humans and animals. Microbial Ecology in Health and Disease. 2000; 12(4):247-85.
[0416] 12. Mitsuoka T. The Human Gastrointestinal Tract. In: B. J. B. W, editor. The lactic acid bacteria. Boston, MA: Springer; 1992.
[0417] 13. Valeur N, Engel P, Carbajal N, Connolly E, Ladefoged K. Colonization and immunomodulation by Lactobacillus reuteri ATCC 55730 in the human gastrointestinal tract. Appl Environ Microbiol. 2004; 70(2):1176-81.
[0418] 14. Talarico T L, Dobrogosz W J. Chemical characterization of an antimicrobial substance produced by Lactobacillus reuteri. Antimicrob Agents Chemother. 1989; 33(5):674-9.
[0419] 15. Weizman Z, Ash G, Alsheikh A. Effect of a probiotic infant formula on infections in child care centers: comparison of two probiotic agents. Pediatrics. 2005; 115(1):5-9.
[0420] 16. Kolodziej M, Szajewska H. Lactobacillus reuteri DSM 17938 in the prevention of antibiotic-associated diarrhoea in children: protocol of a randomised controlled trial. BMJ Open. 2017; 7(1):e013928.
[0421] 17. Mu Q, Tavella V J, Luo X M. Role of Lactobacillus reuteri in human health and diseases. Front Microbiol. 2018; 9:757.
[0422] 18. Indrio F, Riezzo G, Raimondi F, Bisceglia M, Cavallo L, Francavilla R. The effects of probiotics on feeding tolerance, bowel habits, and gastrointestinal motility in preterm newborns. J Pediatr. 2008; 152(6):801-6.
[0423] 19. Jones M L, Martoni C J, Parent M, Prakash S. Cholesterol-lowering efficacy of a microencapsulated bile salt hydrolase-active Lactobacillus reuteri NCIMB 30242 yoghurt formulation in hypercholesterolaemic adults. Br J Nutr. 2012; 107(10):1505-13.
[0424] 20. Shornikova A V, Casas I A, Mykkanen H, Salo E, Vesikari T. Bacteriotherapy with Lactobacillus reuteri in rotavirus gastroenteritis. Pediatr Infect Dis J. 1997; 16(12):1103-7.
[0425] 21. Abrahamsson T R, Sinkiewicz G, Jakobsson T, Fredrikson M, Bjorksten B. Probiotic lactobacilli in breast milk and infant stool in relation to oral intake during the first year of life. J Pediatr Gastroenterol Nutr. 2009; 49(3):349-54.
[0426] 22. Schreiber O, Petersson J, Phillipson M, Perry M, Roos S, Holm L. Lactobacillus reuteri prevents colitis by reducing P-selectin-associated leukocyte- and platelet-endothelial cell interactions. Am J Physiol Gastrointest Liver Physiol. 2009; 296(3):G534-42.
[0427] 23. Klantschitsch T, Spillmann H, Puhan Z, editors. Lactobacillus reuteri: A Newcomer in Dairy Technology; 1996.
[0428] 24. US-FDA. GRAS exemption claim and exemption notification for Lactobacillus reuteri DSM 17938. In: FDA U, editor: GRAS Notice (GRN) No. 254; 2008.
[0429] 25. US-FDA. GRAS exemption claim and exemption notification for Lactobacillus reuteri DSM 17938. GRAS Notice (GRN) No. 410; 2012.
[0430] 26. US-FDA. GRAS exemption claim and exemption notification for Lactobacillus reuteri NCIMB 30242. GRAS Notice (GRN) No. 440; 2013.
[0431] 27. US-NDIN. NDI 78 —Lactobacillus reuteri—Original NDI Notification. In: 78 NN, editor. 2000.
[0432] 28. US-NDIN. NDI Notification 460. RepHresh Pro-B (Lactobacillus reuteri RC-14™ and Lactobacillus rhamnosus GR-1™). NDI Notification 4602000.
[0433] 29. EFSA panel on Biological Hazards, Ricci A, Allende A, Bolton D, Chemaly M, Davies R et al. Scientific opinion on the update of the list of QPS-recommended biological agents intentionally added to food or feed as notified to EFSA. EFSA Journal. 2017; 15(3):e04664.
[0434] 30. US-FDA. GRAS exemption claim and exemption notification for Lactobacillus reuteri NCIMB 30242. GRAS Notice (GRN) No. 4092012.
[0435] 31. Wolf B W, Garleb K A, Ataya D G, Casas I A. Safety and tolerance of Lactobacillus reuteri in healthy adult male subjects. Microbial Ecology in Health and Disease. 1995; 8(2):41-50.
[0436] 32. Wolf B W, Wheeler K B, Ataya D G, Garleb K A. Safety and tolerance of Lactobacillus reuteri supplementation to a population infected with the human immunodeficiency virus. Food Chem Toxicol. 1998; 36(12):1085-94.
[0437] 33. Pradhan D, Mallappa R H, Grover S. Comprehensive approaches for assessing the safety of probiotic bacteria. Food Control. 2020; 108:106872.
[0438] 34. Pariza M W, Gillies K O, Kraak-Ripple S F, Leyer G, Smith A B. Determining the safety of microbial cultures for consumption by humans and animals. Regul Toxicol Pharmacol. 2015; 73(1):164-71.
[0439] 35. Rychen G, Aquilina G, Azimonti G, Bampidis V, Bastos MdL, Bories G, et al. Guidance on the characterisation of microorganisms used as feed additives or as production organisms. EFSA Journal. 2018; 16(3):e05206.
[0440] 36. Seemann T. Prokka: rapid prokaryotic genome annotation. Bioinformatics. 2014; 30(14):2068-9.
[0441] 37. Hyatt D, Chen G-L, LoCascio P F, Land M L, Larimer F W, Hauser L J. Prodigal: prokaryotic gene recognition and translation initiation site identification. BMC Bioinformatics. 2010; 11(1):119.
[0442] 38. Laslett D, Canback B. ARAGORN, a program to detect tRNA genes and tmRNA genes in nucleotide sequences. Nucleic Acids Res. 2004; 32(1):11-6.
[0443] 39. Suzek B E, Ermolaeva M D, Schreiber M, Salzberg S L. A probabilistic method for identifying start codons in bacterial genomes. Bioinformatics. 2001; 17(12):1123-30.
[0444] 40. Kingsford C L, Ayanbule K, Salzberg S L. Rapid, accurate, computational discovery of Rho-independent transcription terminators illuminates their relationship to DNA uptake. Genome Biol. 2007; 8(2):R22.
[0445] 41. Nawrocki E P, Kolbe D L, Eddy S R. Infernal 1.0: inference of RNA alignments. Bioinformatics. 2009; 25(10):1335-7.
[0446] 42. Tjaden B. A computational system for identifying operons based on RNA-seq data. Methods. 2020; 176:62-70.
[0447] 43. Na S I, Kim Y O, Yoon S H, Ha S M, Baek I, Chun J. UBCG: Up-to-date bacterial core gene set and pipeline for phylogenomic tree reconstruction. J Microbiol. 2018; 56(4):280-5.
[0448] 44. Price M N, Dehal P S, Arkin A P. FastTree 2—approximately maximum-likelihood trees for large alignments. PLoS One. 2010; 5(3):e9490.
[0449] 45. Emms D M, Kelly S. OrthoFinder: phylogenetic orthology inference for comparative genomics. Genome Biology. 2019; 20(1):238.
[0450] 46. Sayers E W, Beck J, Bolton E E, Bourexis D, Brister J R, Canese K, et al. Database resources of the National Center for Biotechnology Information. Nucleic Acids Res. 2021; 49(D1):D10-d7.
[0451] 47. Jain C, Rodriguez-R L M, Phillippy A M, Konstantinidis K T, Aluru S. High throughput ANI analysis of 90K prokaryotic genomes reveals clear species boundaries. Nature Communications. 2018; 9(1):5114.
[0452] 48. Xie Z, Tang H. ISEScan: automated identification of insertion sequence elements in prokaryotic genomes. Bioinformatics. 2017; 33(21):3340-7.
[0453] 49. Akhter S, Aziz R K, Edwards R A. PhiSpy: a novel algorithm for finding prophages in bacterial genomes that combines similarity- and composition-based strategies. Nucleic Acids Res. 2012; 40(16):e126.
[0454] 50. Biswas A, Staals R H, Morales S E, Fineran P C, Brown C M. CRISPRDetect: A flexible algorithm to define CRISPR arrays. BMC Genomics. 2016; 17:356.
[0455] 51. Liu B, Zheng D, Jin Q, Chen L, Yang J. VFDB 2019: a comparative pathogenomic platform with an interactive web interface. Nucleic Acids Res. 2019; 47(D1):D687-D92.
[0456] 52. Gupta S K, Padmanabhan B R, Diene S M, Lopez-Rojas R, Kempf M, Landraud L, et al. ARG-ANNOT, a new bioinformatic tool to discover antibiotic resistance genes in bacterial genomes. Antimicrob Agents Chemother. 2014; 58(1):212-20.
[0457] 53. Bortolaia V, Kaas R S, Ruppe E, Roberts M C, Schwarz S, Cattoir V, et al. ResFinder 4.0 for predictions of phenotypes from genotypes. J Antimicrob Chemother. 2020; 75(12):3491-500.
[0458] 54. Seemann T. Abricate: mass screening of contigs for antimicrobial and virulence genes. [cited 2018. Available from: https://github.com/tseemann/abricate].
[0459] 55. Branton W B, Jones M L, Tomaro-Duchesneau C, Martoni C J, Prakash S. In vitro characterization and safety of the probiotic strain Lactobacillus reuteri cardioviva NCIMB 30242. International Journal of Probiotics & Prebiotics. 2011; 6(1):1-12.
[0460] 56. Bover-Cid S, Holzapfel W H. Improved screening procedure for biogenic amine production by lactic acid bacteria. Int J Food Microbiol. 1999; 53(1):33-41.
[0461] 57. Ferreira C L, Grzeskowiak L, Collado M C, Salminen S. In vitro evaluation of Lactobacillus gasseri strains of infant origin on adhesion and aggregation of specific pathogens. J Food Prot. 2011; 74(9):1482-7.
[0462] 58. Eschenbach D A, Davick P R, Williams B L, Klebanoff S J, Young-Smith K, Critchlow C M, et al. Prevalence of hydrogen peroxide-producing Lactobacillus species in normal women and women with bacterial vaginosis. J Clin Microbiol. 1989; 27(2):251-6.
[0463] 59. NCCLS. Development 578 of in vitro susceptibility testing criteria and quality control parameters; approved 579 guideline 2nd ed. Wayne, PA, USA: NCCLS documents M23-A2 NCCLS; 2001.
[0464] 60. Singh A K, Hertzberger R Y, Knaus U G. Hydrogen peroxide production by lactobacilli promotes epithelial restitution during colitis. Redox Biol. 2018; 16:11-20.
[0465] 61. Szkaradkiewicz A K, Stopa J, Karpinski™. Effect of oral administration involving a probiotic strain of Lactobacillus reuteri on pro-inflammatory cytokine response in patients with chronic periodontitis. Arch Immunol Ther Exp (Warsz). 2014; 62(6):495-500.
[0466] 62. FAO/WHO. Guidelines for the evaluation of probiotics in food report of a joint FAO/WHO working group on drafting guidelines for the evaluation of probiotics in food. London Ontario, Canada: World Health Organization; May 1, 2002.
[0467] 63. Cadieux P, Wind A, Sommer P, Schaefer L, Crowley K, Britton R A, et al. Evaluation of reuterin production in urogenital probiotic Lactobacillus reuteri RC-14. Appl Environ Microbiol. 2008; 74(15):4645-9.
[0468] 64. Greppi A, Asare P T, Schwab C, Zemp N, Stephan R, Lacroix C. Isolation and comparative genomic analysis of reuterin-producing Lactobacillus reuteri from the chicken gastrointestinal tract. Front Microbiol. 2020; 11:1166.
[0469] 65. Lee J Y, Han G G, Choi J, Jin G D, Kang S K, Chase B J et al. Pan-genomic approaches in Lactobacillus reuteri as a porcine probiotic: Investigation of host adaptation and antipathogenic activity. Microb Ecol. 2017; 74(3):709-21.
[0470] 66. Duar R M, Frese S A, Lin X B, Fernando S C, Burkey T E, Tasseva G, et al. Experimental evaluation of host adaptation of Lactobacillus reuteri to different vertebrate species. Appl Environ Microbiol. 2017; 83(12).
[0471] 67. Oh P L, Benson A K, Peterson D A, Patil P B, Moriyama E N, Roos S, et al. Diversification of the gut symbiont Lactobacillus reuteri as a result of host-driven evolution. The ISME Journal. 2010; 4(3):377-87.
[0472] 68. Choi H-J, Lee N-K, Paik H-D. Health benefits of lactic acid bacteria isolated from kimchi, with respect to immunomodulatory effects. Food Science and Biotechnology. 2015; 24(3):783-9.
[0473] 69. Oliveira L C, Saraiva T D L, Silva W M, Pereira U P, Campos B C, Benevides L J, et al. Analyses of the probiotic property and stress resistance-related genes of Lactococcus lactis subsp. lactis NCDO 2118 through comparative genomics and in vitro assays. PLoS ONE. 2017; 12(4):e0175116.
[0474] 70. Sandes S, Alvim L, Silva B, Acurcio L, Santos C, Campos M, et al. Selection of new lactic acid bacteria strains bearing probiotic features from mucosal microbiota of healthy calves: Looking for immunobiotics through in vitro and in vivo approaches for immunoprophylaxis applications. Microbiological Research. 2017; 200:1-13.
[0475] 71. Dlamini Z C, Langa R L S, Aiyegoro O A, Okoh A I. Safety evaluation and colonisation abilities of four lactic acid bacteria as future probiotics. Probiotics Antimicrob Proteins. 2019; 11(2):397-402.
[0476] 72. Nordeste R, Tessema A, Sharma S, Kovač Z, Wang C, Morales R, et al. Molecules produced by probiotics prevent enteric colibacillosis in pigs. BMC Vet Res. 2017; 13(1):335.
[0477] 73. Salas-Jara M J, Ilabaca A, Vega M, Garcia A. Biofilm forming Lactobacillus: New challenges for the development of probiotics. Microorganisms. 2016; 4(3):35.
[0478] 74. Granato D, Bergonzelli G E, Pridmore R D, Marvin L, Rouvet M, Corthésy-Theulaz I E. Cell surface-associated elongation factor Tu mediates the attachment of Lactobacillus johnsonii NCC533 (Lal) to human intestinal cells and mucins. Infect Immun. 2004; 72(4):2160-9.
[0479] 75. Boekhorst J, de Been M W, Kleerebezem M, Siezen R J. Genome-wide detection and analysis of cell wall-bound proteins with LPxTG-like sorting motifs. J Bacteriol. 2005; 187(14):4928-34.
[0480] 76. Antelmann H, Scharf C, Hecker M. Phosphate starvation-inducible proteins of Bacillus subtilis: Proteomics and transcriptional analysis. Journal of Bacteriology. 2000; 182(16):4478.
[0481] 77. Oh J-H, Lin X B, Zhang S, Tollenaar S L, Özçam M, Dunphy C, et al. Prophages in Lactobacillus reuteri are associated with fitness trade-offs but can increase competitiveness in the gut ecosystem. Applied and Environmental Microbiology. 2019; 86(1):e01922-19.
[0482] 78. Lennon J T, Khatana S A, Marston M F, Martiny J B. Is there a cost of virus resistance in marine cyanobacteria?Isme j. 2007; 1(4):300-12.
[0483] 79. US-FDA. GRAS Exemption Claim and Exemption Notification for Lactobacillus paracasei ssp. paracasei strain FI 9: GRAS Notice (GRN) No. 840; 2018.
[0484] 80. Axelsson L. Lactic acid bacteria: Classification and physiology. In: Salminen S, Wright, A. V. and Ouwehand, A., editor. Lactic Acid Bacteria: Microbiological and Functional Aspects. 3 ed. New York: Marcel Dekker; 2004. p. 1-67.
[0485] 81. Papagaroufalis K, Fotiou A, Egli, Tran L A, Steenhout P. A Randomized double blind controlled safety trial evaluating d-lactic acid production in healthy infants fed a Lactobacillus reuteri-containing formula. Nutr Metab Insights. 2014; 7:19-27.
[0486] 82. Iino T, Manome A, Okada S, Uchimura T, Komagata K. Effects of sodium acetate on the production of stereoisomers of lactic acid by Lactobacillus sakei and other lactic acid bacteria. J Gen Appl Microbiol. 2001; 47(5):223-39.
[0487] 83. Saulnier D M, Santos F, Roos S, Mistretta T A, Spinler J K, Molenaar D, et al. Exploring metabolic pathway reconstruction and genome-wide expression profiling in Lactobacillus reuteri to define functional probiotic features. PLoS One. 2011; 6(4):e18783.
[0488] 84. Kyla-Nikkila K, Hujanen M, Leisola M, Palva A. Metabolic engineering of Lactobacillus helveticus CNRZ32 for production of pure L-(+)-lactic acid. Appl Environ Microbiol. 2000; 66(9):3835-41.
[0489] 85. Karton M, Rettmer R L, Lipkin E W. Effect of parenteral nutrition and enteral feeding on D-lactic acidosis in a patient with short bowel. JPEN J Parenter Enteral Nutr. 1987; 11(6):586-9.
[0490] 86. Scully T B, Kraft S C, Carr W C, Harig J M. D-lactate-associated encephalopathy after massive small-bowel resection. J Clin Gastroenterol. 1989; 11(4):448-51.
[0491] 87. Hudson M, Pocknee R, Mowat N A. D-lactic acidosis in short bowel syndrome—an examination of possible mechanisms. Q J Med. 1990; 74(274):157-63.
[0492] 88. Becker K, Southwick K, Reardon J, Berg R, MacCormack J N. Histamine poisoning associated with eating tuna burgers. JAMA. 2001; 285(10):1327-30.
[0493] 89. Ohnuma S, Higa M, Hamanaka S, Matsushima K, Yamamuro W. An outbreak of allergy-like food poisoning. Intern Med. 2001; 40(8):833-5.
[0494] 90. Miki M, Ishikawa T, Okayama H. An outbreak of histamine poisoning after ingestion of the ground saury paste in eight patients taking isoniazid in tuberculous ward. Intern Med. 2005; 44(11):1133-6.
[0495] 91. Vrancken G, Rimaux T, Wouters D, Leroy F, De Vuyst L. The arginine deiminase pathway of Lactobacillus fermentum IMDO 130101 responds to growth under stress conditions of both temperature and salt. Food Microbiol. 2009; 26(7):720-7.
[0496] 92. Van Deest B W, Fordtran J S, Morawski S G, Wilson J D. Bile salt and micellar fat concentration in proximal small bowel contents of ileectomy patients. J Clin Invest. 1968; 47(6):1314-24.
[0497] 93. Lin J, Sahin O, Michel L O, Zhang Q. Critical role of multidrug efflux pump CmeABC in bile resistance and in vivo colonization of Campylobacter jejuni. Infect Immun. 2003; 71(8):4250-9.
[0498] 94. Musikasang H, Tani A, H-kittikun A, Maneerat S. Probiotic potential of lactic acid bacteria isolated from chicken gastrointestinal digestive tract. World Journal of Microbiology and Biotechnology. 2009; 25(8):1337-45.
[0499] 95. Kararli T T. Comparison of the gastrointestinal anatomy, physiology, and biochemistry of humans and commonly used laboratory animals. Biopharm Drug Dispos. 1995; 16(5):351-80.

### Example 4

### Evaluation of L. reuteri Strains Evaluated in a Chronic Alcohol Consumption Model

[0500] Chronic alcohol consumption is a leading cause of chronic liver disease worldwide, leading to cirrhosis and hepatocellular carcinoma. Alcoholic liver disease (ALD) is a major cause of morbidity and mortality worldwide and includes a broad spectrum of disorders, ranging from steatosis to severe forms of liver injury such as steatohepatitis, cirrhosis and hepatocellular carcinoma (Gao, B. & Bataller, R. (2011) Gastroenterology 141, 1572-1585; Tsukamoto, H. & Lu, S. C. (2001) FASEB J.

[0501] 15, 1335-1349; O'Shea, R. S., Dasarathy, S. & McCullough, A. J. (2010) Hepatology 51, 307-328; Stickel, F. & Seitz, H. K. (2010) Best Pract. Res. Clin. Gastroenterol. 24, 683-693; Beer, J I, Arteel, G. E. & McClain, C. J. (2011) Curr. Gastroenterol. Rep. 13, 56-64). There is also alcohol-related damage to other organs, such as the pancreas, heart, kidney, lung and CNS. Further, chronic alcohol consumption is associated with compromised innate and adaptive immune responses to infectious disease.

[0502] Chronic alcohol abuse is associated with gut barrier alteration, dysbiosis and immune activation. Alcohol-dependent subjects present with increased intestinal permeability (leaky gut) and altered gut microbiota composition and functionality. This favors the translocation of gut-derived bacterial components, such as lipopolysaccharides (LPS) and peptidoglycan (PGN), from the gut lumen to the systemic circulation and other organs. Bacterial ligands are recognized by Toll-like receptors (TLRs) expressed by immune cells and induce an inflammatory response.

[0503] Mucosa-associated invariant T (MAIT) cells play a critical role in antibacterial host defense. Binge-on-chronic alcohol feeding has been shown to lead to a significant reduction in the abundance

of MAIT cells in the barrier tissues (Gu M et al (2021) Alcohol Clin Exp Res 00:1-4; doi:10.1111/acer.14589). Transplantation of fecal microbiota from alcohol fed (AF) mice resulted in a MAIT cell profile aligned to that of AF mouse donor. Antibiotic treatment abolished the MAIT cell differences between AF and PF animals. MAIT cells in the intestine, liver, and lung are perturbed by alcohol use and these changes are partially attributable to alcohol-associated dysbiosis. The changes to the
MAIT cell profile in AF animals are mediated by the gut microbiota, as alcohol dysbiosis transplantation replicated many of the effects of alcohol on MAIT cells in the absence of alcohol exposure.

[0504] The previously widely used model for alcoholic liver injury was ad libitum feeding with the Lieber-DeCarli liquid diet containing ethanol for 4-6 weeks. This model, without the addition of a secondary insult, only induces mild steatosis, slight elevation of serum alanine transaminase (ALT) and little or no inflammation (Cohen, J. I L et al (2010) Gastroenterology 139, 664-674; Mandrekar, P. et al (2011) Hepatology 54, 2185-2197; Nath, B, et a. (2011) Hepatology 53, 1526-1537; Hu, M. et al. (2012) Hepatology 55, 437-446; Liangpunsakul, S. et al. (2012) Am. J. Physiol. Gastrointest. Liver Physiol. 302, G515-523; Leung, T. M. et al. (2012) Hepatology 55, 1596-1609). Bertola et al have described a simple mouse model of alcoholic liver injury by chronic ethanol feeding (10-d ad libitum oral feeding with the Lieber-DeCarli ethanol liquid diet) plus a single binge ethanol feeding (Bertola A et al (2013) Nature Protocols 8(3):627-637). This chronic-binge ethanol feeding model achieves high blood alcohol levels, elevation of serum ALT and AST and infiltration of neutrophils. This model can be carried out in a shorter time period compared with previous rodent models of ALD (15 d in this chronic-plus-single-binge model versus 5-7 weeks in previous chronic models), and is easily applicable to multiple research areas including ALD and other organ damage caused by alcohol consumption.

[0505] Binge-on-chronic alcohol feeding in animal models shifts gut microbiota diversity and functional capacity. Human and rodent studies have reported that excessive alcohol consumption changes gut microbiota composition, structure, and metabolic function (Leclercq S et al. (2014) Proceedings of the National Academy of Sciences of the United States of America, 111, E4485-E4493, 2014a; Mutlu, E A et al. (2012) American Journal of Physiology-Gastrointestinal and Liver Physiology, 302, G966-G978). Recent studies have shown that alterations in the intestinal immune response as a consequence of alcohol-induced dysbiosis contribute to increased susceptibility to infections including bacterial infections such as Klebsiella pneumonia, and Streptococcus pneumonia.

[0506] The Lactobacillus reuteri strains strain 3632 (PTA-126788) and strain 3830 (PTA-126787) were evaluated in a chronic-binge ethanol feeding model (Bertola A et al (2013) Nature Protocols 8(3):627-637) for alleviation of alcohol effects. The model-based study is depicted in FIG. 10. Mice were acclimated to Lieber-DeCarli liquid control diet (Bioserv, Flemington, NJ) for 5 days. Afterward, animals were randomized into alcohol-fed (AF; Lieber-DeCarli ethanol [EtOH] liquid diet) and pair-fed (PF) groups (control diet) (n=10/group). (PF: Pair-fed; AF: Alcohol-fed; AFEP: alcohol-fed+ strain 3632 and 3630 probiotic; AFBB: Alcohol-fed+ Blueberry; AFBC: Alcohol-fed+ Broccoli). AF mice were fed with EtOH liquid diet (5.0%, vol/vol) for 10 days and received 4 g/kg body weight EtOH by gavage at day 5 and day 10. Blood alcohol concentrations averaged 200 mg/dl before the binge and reached ˜400 mg/dl post binge (Samuelson D. R. et al (2017) PLOS Pathogens 13(6): e1006426; doi.org/10.1371/journal.ppat.1006426). The amount of control liquid diet for PF mice was adjusted daily according to the food intake of AF mice during the experiment. Mice were sacrificed 24 h following the last binge EtOH administration. The AFEP group was fed 3×10⁹ CFUs/mice/day of L. reuteri 3630 and 3632 (1:1 ratio) for 14 days. AFBC and AFBB groups were fed 2% (w/v) of Broccoli and Blueberry, respectively.

[0507] FIG. 10 depicts the protocol for the binge on chronic alcohol murine model utilized in these studies. FIG. 11 provides the effect of various treatments/feed conditions on gut leak in the binge on chronic alcohol murine model. FITC-dextran was gavaged and fluorescence measured in the serum to determine gut leak. Pair fed animals were used as controls and were compared to alcohol fed animals and alcohol fed animals supplemented with L reuteri 3632 and 3630 in their feed. The results clearly demonstrate that a combination of strains 3632 and 3630 led to significantly decreased gut leak, near to or below the levels of control animals.

[0508] Administration of a combination of L. reuteri strains strain 3632 (PTA-126788) and strain 3830 (PTA-126787) (in a 1:1 ratio) alleviated the negative effects of alcohol consumption in animals in the chronic alcohol model. Oral administration of L. reuteri 3630 and 3632 protected animals against gut leak as measured by translocation of orally gavaged FITC-dextran into systemic circulation in a binge-on-chronic alcohol model of leaky gut. Intestinal microbial products from alcohol-fed mice have been shown to contribute to intestinal permeability and peripheral immune activation (Samuelson D R et al (2019) Alcohol Clin Exp Res. 43(10):2122-33). Also, alcohol use is associated with intestinal dysbiosis and dysfunctional CD8+ T-cell phenotypes in humans with human immunodeficiency virus (Maffei V J et al J Infect Dis. 2021; 223(6):1029-39).

### Example 5

### Evaluation of L. reuteri Strains on Cytokine Expression in a Chronic-Binge-on Alcohol Model

[0509] Chronic inflammatory states, such as IBD and celiac disease and chronic overuse of alcohol have been shown to result in altered or increased intestinal permeability. Intestinal permeability is a recognized feature of several inflammatory and autoimmune diseases affecting the digestive system, including inflammatory bowel disease, Crohn's disease and celiac disease (Bjarnason I et al (1983) Lancet 1:323-5; Hollander D et al (1986) Ann Intern Med 1986; 105:883-5; Vazquez-Roque M I et al (2013) Gastroenterology 144:903-11, e3; D'Incà R et al (1999) Am J Gastroenterol 94:2956-60).

[0510] Inflammatory states or conditions can be marked by increased levels of proinflammatory cytokines and/or reduced levels of anti-inflammatory cytokines. The effects of treatment with L. reuteri strains 3630 and 3632 was evaluated in the leaky gut model on the expression of expression of various cytokines.

[0511] Proinflammatory cytokines such as IL-6, TNF-α, IFN-γ and IL-1β were evaluated. IL-22 was also assessed as IL-22 is known to regulate intestinal epithelial cell function via promoting epithelial cell regeneration, innate defense and membrane mucus production (Patnaude L et al (2021) Life Sci 271:119195). IL-10 was also determined. IL-22 and IL-10 are anti-inflammatory cytokines.

[0512] Using animals in the above example binge on chronic alcohol model, the expression of cytokines IL-6, TNF-α, IL-22, IL-10, IFN-γ and IL-1β were determined. The fold change in each of these cytokines in the intestines of animals fed Lieber-DeCarli ethanol (EtOH) liquid diet (denoted AF), pair fed control diet (denoted PF) and alcohol fed mice treated with L reuteri 3632 and 3630 in 1:1 ratio (denoted AFPE) for 10 days is depicted in FIGS. 12, 13 and 14. Animals fed a combination of L. reuteri 3632 and 3630 demonstrated reduced levels of each and all of proinflammatory cytokines IL-6, TNF-α, IFN-γ and IL-1β. Animals fed L. reuteri 3632 and 3630 showed increased levels of IL-22 and of IL-10.

[0513] Feeding or administering L. reuteri strains 3630 and 3632 altered inflammation and the inflammatory response in alcohol fed animals, animals with leaky gut or increased intestinal permeability. The strains reduced pro-inflammatory cytokines demonstrating a direct anti-inflammatory effect by the L. reuteri strains. The strains blocked and/or reduced inflammatory responses and protected animals from inflammation and the pro-inflammatory cascade and response. The strains also increased the amount or expression of anti-inflammatory cytokines, particularly including Il-10 and IL-22.

### Example 6

### Lactobacillus reuteri AhR-Activating Metabolite and Polyketide Synthase (PKS) Biosynthetic Cluster

[0514] The anti-inflammatory, anti-bacterial and probiotic effects and capabilities of the L reuteri strains 3630 and 3632 are described above. The L. reuteri strains 3630 and 3632 are described and detailed as probiotic strains in Probiotic Compositions Comprising Lactobacillus reuteri Strains and Methods of Use PCT/US2020/016668 filed Feb. 4, 2020, published as WO 2020/163398 Aug. 13, 2020, and corresponding US publications US 2022/0088094 published Mar. 24, 2022 and US 2022/0125860 published Apr. 28, 2022. In particular, as described and demonstrated above, a combination of L. reuteri strains 3630 and 3632 provides significant anti-inflammatory and proinflammatory blocking capability upon administration to animals, including oral administration such as administering in feeds. There are also unique aspects of L. reuteri strain 3632 in terms of anti-inflammatory activity and capability.

[0515] The growth kinetics, ability to produce hydrogen peroxide and other properties of the L. reuteri strains, including strains 3632 and 3630 are described above, including in Example 1. Generally, the strains behave similarly in terms of some probiotic properties, including growth kinetics and ability to produce hydrogen peroxide. L. reuteri strain 3632, however, shows some unique properties, including the ability to autoaggregate in liquid media (comparable to that of the well-characterized human probiotic strain L. reuteri ATCC 23272) (FIG. 5). In addition to autoaggregation, L. reuteri 3632 also appears to produce an orange pigment, which resembles beta carotene in color. The other L. reuteri strains evaluated above particularly including L. reuteri strain 3630 (PTA-126787) and the human L. reuteri strain ATCC 23272 and L. acidophilus, produced orange colored pigment. None of the strains is found to be hemolytic on blood agar plates, suggesting that these isolates are less likely to be pathogenic to humans.

[0516] Polyketide synthases (PKS) and nonribosomal peptide synthases (NRPS) are secondary metabolites produced by biosynthetic gene clusters (BCGs) that assemble simple molecules, such as acetyl-CoA, into complex metabolites, some of which (i.e., erythromycin) are important to the pharmaceutical industries. A biosynthetic gene cluster (BGC) is a group of genes in bacteria that work together to produce or generate one or more molecules or proteins, or in some instances a protein complex, that provide one or more activity or related activities and/or serve a related or final function. Clustering of a group of genes can permit or enable timed and coordinated synthesis, for example of proteins involved in a pathway. The proteins can be under the control of multiple promoters or transcribed by a single promoter or group of promoters.

[0517] The gut microbiome encodes for several BGCs that produce secondary metabolites that directly interact with the host immune system. Of particular importance is the BGCs that encode for aryl hydrocarbon receptor (AhR)-activating metabolites. AhR is a ligand-activated transcription factor activated by various environmental ligands of plant or microbial origin. AhR recognizes environmental pollutants, dietary compounds (i.e., glucobrassicin and flavonoids), and microbial-derived secondary metabolites (i.e., indole-3-carbinol). Ahr sensing of environmental pollutants and dietary-derived compounds contributes to the intestinal homeostasis between the host and gut microbiota. Upon ligand binding, AhR translocates into the nucleus to induce target gene expressions (FIG. 15; Barrosa A et al (2021) Cellular Mol Immunol 18:259-268). AhR activation by appropriate ligands up-regulates expression of various gene products that either play an essential role in strengthening the epidermal barrier function (such as FLG, LOR and IVL) or help neutralize disease-associated ROS response (NRF2).

[0518] The host can recognize microbial metabolites via different pathways, including via pattern recognition receptors and the aryl hydrocarbon receptor (AhR) (Takeuchi O, Akira S (2010) Cell 140:805-820; doi.org/10.1016/j.cell.2010.01.022; Moura-Alves P et al (2014) Nature 512:387-392; doi.org/10.1038/nature13684). The role of AhR has been extensively studied in relation to metabolism of environmental toxins, but the focus has recently shifted to its role in modulation of the adaptive and innate immune system. AhR is a ligand activated transcription factor that plays a key role in a variety of diseases, including amelioration of intestinal inflammation. Understanding the mechanism by which a bacterium modulates the immune system is critical for applying rational selection strategies for probiotic supplementation.

[0519] Heterologous and/or optimized expression of PKS provides a step toward the development of next-generation probiotics to prevent and treat disease. The activation of AhR, for example, is important for the production of interleukin-22 (IL-22), which enhances the innate immune response by inducing the production of antimicrobial peptides (Reg3 lectins) to fight off intestinal pathogens and to protect intestinal tissues from inflammation damage by inducing tight junction proteins (Lamas B, Natividad J M, Sokol H. (2018) Mucosal Immunol 11:1024-1038; Monteleone I. et al (2011) Gastroenterology 141:237.e1-248.e1). L. reuteri strains 3630 and 3632 administered in combination are shown above to increase IL-22 expression (Example 5, FIG. 13).

[0520] In mammals, 99% of dietary tryptophan is taken up by the host, thereby limiting tryptophan availability to the microbiota to produce AhR ligands. Therefore, identification of specific gut microbes, including L. reuteri strains, that activate AhR independent of tryptophan metabolism is important for developing AhR-mediated biotherapeutic strategies to target intestinal diseases.

[0521] The role of AhR has been extensively studied in relation to metabolism of environmental toxins, but the focus has recently shifted to its role in modulation of the adaptive and innate immune system. AhR is a ligand activated transcription factor that plays a key role in a variety of diseases including amelioration of intestinal inflammation. Although initial studies focused on ligands such as polycyclic aromatic hydrocarbons (PAHs), polychlorinated biphenyls (PCBs) and halogenated aromatic hydrocarbons (HAHs), it is now clear that a broad range of dietary, commensal and endogenous, ligands activate AHR (Denison, M. S. et al (2011) Toxicol Sci 124, 1-22; Gutierrez-Vazquez, C. & Quintana, F. J. (2018) Immunity 48, 19-33; Quintana, F. J. & Sherr, D. H. (2013) Pharmacol. Rev. 65, 1148-1161; Lee, H. U. et al (2017) J. Mol. Med. 95, 29-39). Multiple physiological and dietary AHR ligands have been identified, including tryptophan metabolites such as 6-formylindolo[3,2-b]carbazole (FICZ), kynurenine, indigo, indirubin, the pigment curcumin, carotenoids, flavonoids, bilirubin and biliverdin, 2-(1′H-indole-3′-carbonyl)-thiazole-4-carboxylic acid methyl ester (ITE), indoxyl-3-sulfate (I3S), indole-3-carbinol (I3C), gallic acid, prostaglandins and eicosanoids (Barrosa A et al (2021) Cellular Mol Immunol 18:259-268). Additional AHR agonists are produced by the metabolism of commensal microorganisms (Roager, H. M. & Licht, T. R. (2018) Nat Commun 9, 3294; Rothhammer, V. et al. (2018) Nature 557, 724-728).

[0522] Ozcam et al have shown that some L. reuteri strains can activate the aryl hydrogen receptor (AhR) and that this activation is associated and correlated with the presence of PKS gene cluster and its metabolite(s) (Ozcam M et al (2019) Appl Environ Microbiology 85(10):e01661-18). Strains that have the PKS biosynthetic gene cluster activate AhR and produce a bright orange pigment. Deletion of the PKS gene cluster results in loss of the ability to activate the AhR receptor. AhR activation by L. reuteri has been shown to alleviate E. coli-induced mastitis in mice (Zhao C et al (2021) PLOS Pathogens 17(17):e1009774), and could be an effective approach against mastitis in other animals, particularly lactating animals, such as cattle for example. AhR activity and AhR-expressing micriobiota communications have been multi-factorially implicated, including in modulation of immune tolerance and response, intestinal homeostasis, carcinogenesis and intestinal barrier integrity (Dong F and Perdew G H (2020) Gut Microbes doi.org/10.1080/19490976.202.1859812). AhR has been implicated in various inflammatory- and immune-mediated conditions, such as atopic dermatitis.

[0523] Lactobacillus reuteri strain 3632 (ATCC PTA-126788) produces an orange pigment and includes a biosynthetic gene cluster (BGC) that encodes for a polyketide synthase which can act as an AhR-activating metabolite. The L. reuteri metabolite appears to give an orange pigmentation to the strain and is primarily associated with cell wall or cell envelope. Lactobacillus reuteri strain 3632 (ATCC PTA-126788) is described as having a characteristic orange pigment, including in Kumar et al, WO 2020/163398A1, published Aug. 13, 2020, the entire contents of which is incorporated herein by reference. Lactobacillus reuteri strain 3632 is detailed and described, including nucleic acid sequence in Kumar et al, WO 2020/163398A1, published Aug. 13, 2020, the entire contents of which is incorporated herein by reference. The genomic contigs and genome nucleic acid sequence of L. reuteri strain 3632 is also set out herein and provided in SEQ ID NOs: 49-55.

[0524] The stimulation of aryl hydrocarbon receptor (AhR) was evaluated with L. reuteri strain 3632-derived materials and with standard AhR ligands. 6-Formylindolo[3,2-b]carbazole (FICZ) was used as a standard AhR ligand compound, and its structure is depicted below:

[chemical structure]

[0525] Methods utilized to assess AhR activation in vitro were as follows: HepG2-Lucia™ AhR cells (Invivogen, hpgl-ahr) were grown at 37° C., 5% CO₂ in MEM (Thermo Fisher, 616965-026), 10% iFCS. For selection purposes, culture medium was supplemented with 100 μg/ml zeocin (Invivogen, ant-zn-5).

### Ligand Test Items:

[0526] FICZ: 6-Formylindolo[3,2-b]carbazole; AhR Agonist (Invivogen, tlrl-ficz)
[0527] L-Kynurenine: β-Anthraniloyl-L-Alanine; AhR Agonist (Invivogen, tlrl-kyn)
[0528] Purified L. reuteri PKS metabolite in a glass vial 2.5 mg/ml in DMSO was prepared as follows:
   [0529] (a) L. reuteri 3632 cell pellet was resuspended in 45 ml PBS (same volume as the corresponding culture supernatant), (for some samples: filtration via 0.2 μM)
   [0530] (b) L. reuteri 3632 supernatant, sterile filtered via 0.2 μM Media control, sterile filtered via 0.2 μM
[0531] The dilution of ligands was performed at 2× of the intended final concentration in 40 ml complete growth medium. +40 μl 2.2×10⁵ cells/ml
[0532] Culture supernatants were harvested at different time points (e. g. 48 h) and subjected to Luciferase Assay enzyme assays.

### Measurement of Luciferase in 384 Well, White Plate:

[0533] 10 μl culture supernatant/well sample
[0534] +15 μl/well Quanti-Luc/Coelenterazine-utilizing luciferase detection medium (Invivogen rep-qlc) in 50 ml ddH2O (instead 25 ml). The reaction is monitored at room temperature (RT) with BioTek plate Reader.

[0535] The first in vitro data from HepG2-Lucia cells demonstrated dose-dependent AHR activation by fractions from L. reuteri LR3632 extract enriched for pks metabolite. Initial data results are depicted in FIG. 17, which compares AhR activator activity of control FICZ versus L reuteri 3632 pks metabolite (2.5 mg/ml).

[0536] Additional AHR activation studies were conducted in accordance with the methods described above wherein AHR activator activity was assessed in L. reuteri 3632 supernatant, cell pellet resuspended, and medium (FIG. 18). Significant AhR activator activity was identified in the L reuteri 3632 pellet resuspended. The medium and supernatant had limited to no significant activity. To volume match the samples evaluated, the cell pellet was resuspended in the same volume as the culture supernatant and a direct comparison of ligand presence in the supernatant versus the pellet resusupended was conducted (FIG. 19). Again, significant Ahr activity is demonstrated in the pellet resuspended with little activity in the L reuteri strain 3632 0.2 μM filtered supernatant.

[0537] The PKS cluster from Lactobacillus reuteri which can produce the candidate AhR-activating metabolite has been assessed and determined from L. reuteri 3632. In particular, the Lactobacillus reuteri strain 3632 (ATCC PTA-126788) contains a BGC that encodes for a full suite of proteins required for synthesis and production of the AhR-activating metabolite. This L. reuteri 3632 cluster was compared to previously described PKS gene clusters encoding and producing Ahr metabolite from gut symbiont L reuteri strains R21c and 2010 (FIG. 16). Ozcam et al describes and assesses strains R2Ic and 2010 as encoding a polyketide synthase cluster that activates the mammaliam aryl hydrocarbon receptor (Ozcam M et al (2019) Applied and Environ Microbiology 85(1):e01661-18).

[0538] The PKS gene cluster from Lactobacillus reuteri strain 3632 is diagrammed and shown in FIG. 16. The BGC is encoded on a conjugation plasmid of 165 kb. The BGC contains 15 genes that encode for a full suite of proteins needed for the synthesis of AhR-activating metabolite (TABLE 16). Within the cluster, typical PKS modules are encoded for chain extension, reduction, and dehydration. A multi-subunit biotin-dependent acetyl-CoA carboxylase enzyme converts acetyl-CoA to malonate, which acts as the primary building block for the metabolite (pksK-N). An unusual feature of the BGC is the lack of a polyketide thioesterase enzyme that would release the full-length natural product from its acyl-carrier protein. Instead, a glyoxylase-like enzyme, pksG, likely serves this purpose. The gene cluster enables synthesis and production of active and effective AhR-activating metabolite by L. reuteri strain 3632. Cloning an additional copy of the cluster or introducing highly expressed constitutive or inducible promoters in the gene cluster can be utilized to increase the Ahr metabolite expression and production or to control or regulate Ahr activation by the L. reuteri strain.

TABLE 16
Genes and encoded proteins involved in the synthesis of Ahr-activating metabolite

| | | | Length | | |
|---|---|---|---|---|---|
| | | | (amino | | Amino acid |
| Locus tag | Gene | Description | acids) | Remarks | SEQ ID NO: |
| LREU3632_{—} | emrY/ | putative multidrug | 561 | Transporter | SEQ ID |
| 02405 | pksA | resistance protein EmrY | | | NO: 78 |
| LREU3632_{—} | fabF_{—} | 3-oxoacyl-[acyl-carrier- | 699 | | SEQ ID |
| 02406 | 2/pksB | protein] synthase 2 | | | NO: 79 |
| LREU3632_{—} | pksC | acyl carrier protein | 90 | | SEQ ID |
| 02407 | | | | | NO: 80 |
| LREU3632_{—} | fabG_{—} | 3-oxoacyl-[acyl-carrier- | 239 | reductase | SEQ ID |
| 02408 | 2/pksD | protein] reductase FabG | | | NO: 81 |
| LREU3632_{—} | pksE | [acyl-carrier-protein] | 175 | reductase | SEQ ID |
| 02409 | | reductase | | | NO: 82 |
| LREU3632_{—} | fabZ | 3-hydroxyacyl-[acyl- | 112 | | SEQ ID |
| 02410 | 3/pksF | carrier-protein] | | | NO: 83 |
| | | dehydratase FabZ | | | |
| LREU3632_{—} | pksG | Glyoxylase/metallo- | 298 | thioesterase | SEQ ID |
| 02411 | | beta-lactamase | | | NO: 84 |
| | | superfamily protein | | | |
| LREU3632_{—} | pksH | Transferase protein | 184 | transferase | SEQ ID |
| 02412 | | | | | NO: 85 |
| LREU3632_{—} | pksI | Transcriptional regulator | 177 | May not be | SEQ ID |
| 02413 | | PadR-like family protein | | required | NO: 86 |
| LREU3632_{—} | baeC/ | Polyketide biosynthesis | 317 | | SEQ ID |
| 02414 | pksJ | malonyl CoA-acyl | | | NO: 87 |
| | | carrierprotein | | | |
| | | transacylase BaeC | | | |
| LREU3632_{—} | accB/ | Biotin carboxyl carrier | 142 | | SEQ ID |
| 02415 | pksK | protein of acetyl-CoA | | | NO: 88 |
| | | carboxylase | | | |
| LREU3632_{—} | cfiB/ | 2-oxoglutarate | 459 | | SEQ ID |
| 02416 | pksL | carboxylase small | | | NO: 89 |
| | | subunit | | | |
| LREU3632_{—} | accD | Acetyl-coenzyme A | 279 | | SEQ ID |
| 02417 | 2/ | carboxylase carboxyl | | | NO: 90 |
| | pksM | transferase | | | |
| | | subunit beta | | | |
| LREU3632_{—} | accA | Acetyl-coenzyme A | 252 | | SEQ ID |
| 02261 | 2/ | carboxylase carboxyl | | | NO: 91 |
| | pksN | transferase subunit | | | |
| | | alpha | | | |
| LREU3632_{—} | pksO | bifunctional biotin-- | 144 | ligase | SEQ ID |
| 02262 | | [acetyl-CoA-carboxylase] | | | NO: 92 |
| | | synthetase/biotin operon | | | |
| | | repressor | | | |

[0539] Note that LREU3632_02265 indicated in Table 16 may not be required.

[0540] Strains are evaluated for AhR activity as follows. The strains are grown overnight in LB media. The cell pellet and the filter sterilized culture supernatant is evaluated for AhR activity using HepG2-Lucia™ AhR cells (Invivogen, hpgl-ahr). HepG2-Lucia™ AhR cells will be grown at 37° C., 5% CO₂ in MEM (Thermo Fisher, 616965-026), with 10% iFCS. For selection purposes, culture medium is supplemented with 100 μg/ml zeocin (Invivogen, ant-zn-5). FICZ (6-Formylindolo[3,2-b]carbazole; AhR Agonist and L-Kynurenine will be used as positive controls. Media control and strain controls are also included. The dilution of test material is performed at 2× of the intended final concentration in 40 ml complete growth medium and added with 40 μl of 2.2×10⁵ cells/ml. Culture supernatants are harvested at different time points (over 48 h) and subjected to Luciferase Assay. For measuring luciferase activity in 384 well, white plate, 10 μl culture supernatant/well sample is added with 15 μl/well of Quanti-Luc/Coelenterazine-utilizing luciferase detection medium (Invivogen rep-qlc) in 50 ml ddH2O (instead 25 ml). The reaction is monitored at room temperature with BioTek plate Reader.

[0541] Efficacy of the AhR metabolite in vivo is further assessed using a mouse atopic dermatitis (AD) animal model (Martel B C et al (2017) Yale J Biol and Med 90:389-402). The AhR activator tapinarof is in clinical development for treatment of psoriasis and atopic dermatitis (AD) in humans (Bissonnette R et al (2021) J Am Acad Dermatol 84:1059-1067; Lebwohl M et al (2020) Skin J Cutane Med 4(6):s75). Tapinarof is a secondary metabolite from Photorhabdus luminescens.

[0542] The full sequence of the L. reuteri strain 3632 PKS cluster along with 5 kb flanking regions on both sides of the BGC, corresponding in total to 12,969 bp is provided below (SEQ ID NO: 77).

```
        1 gcaagaattt atcccatagt ttgcgagaaa tccttttaga agagcttgcc taataatagc
      61 ggctcaatat aatttaaatt taaaaccacc taattagcaa tcgtaaaatt gttaattagg
    121 tggttttagt atagaaataa cccctaaatt cagaatacta gaaaatctag tactattatt
    181 ttttcctttt cgggaataat agacatgaaa gacaagaaaa gataagaaat ggtaaggaaa
    241 ctttgtacag tttaataaaa gcagttgagt attgactatt ggcgtaagtt ttgatttttt
    301 taattgtaat attaatagaa ttatttaatc tatgaaatac taatttcaca tttgcttttg
    361 tatgtgaata aatctctttt tcttggatct tagagggttc gtaaggtaag gaattaattt
    421 gtttagtata ttctttatcc gtagtttctt taattaattt cttcgaaaaa tgctttgatg
    481 gtgttcgaga gtttgaattg ttgtttaagc ttttaataga gttatctctt attttatttt
    541 tttgatattt aggaatattt aagttattga cctgctgatt gatgtaacta atagaattat
    601 gctttgcggt atttaaattc ccatatagtc cagttagaaa tattgctaca gctaaggaaa
    661 cccctacttg tcttaaaaca cctgcaacac tttgtgaagc ggttaagaga taaccttcaa
    721 agtttgatgc tgctaaaact gttattggac ctgcaataat cccataccca gttcctaaaa
    781 taatacaagt aaaaataatt aaggtaatat tatccatatc aatatgtgta aataaatagt
    841 aagagatacc cattaataga aaaccagata agataatggc tcgagatcct aatttgtcta
    901 agagaattgc agaaagtggt gacatgataa aaatcattcc tgtaataggc gtgataagaa
    961 gtgcagcttc taattcggtt ctatgttgta tatgggtaaa atatgttggt aaaattactg
  1021 taacagccac cagaaataaa ttacttaaaa ttatagaaac ggcagagccg gtaaattctc
  1081 tattcttaaa taaaacaaga ggaatcattg gtgctttagc ataatgctca gtaattaaga
  1141 atagtatgaa agttaaaatg aaaatgaaaa acagaaggtt gattgcagga cttttccacc
  1201 cccagcttct tccttgagtc aatattagag ttaaagctga aagtaaaatt atacctaaaa
  1261 gggaacctaa ataatcattt ccttcatttg actttggttc gtgaaagttg aaagtagata
  1321 aacaaataac tagtgaaagt atagtaaaag gtatattaac gctaaatata gaatgccagc
  1381 ccataaattg agttagaata cctccgattg aaggaccaag agcagcagct aaaccttgag
  1441 tgattcctaa tgcggcaata actttttttc ttgtctttac tgtaacgata tttattccaa
  1501 tagtcattga aagtggaaaa agaattgcgg ctcctaatga ttgaatgcca cggccaagaa
  1561 ttaaaatagc taggttagga cttataccag aaatacttga tccaataaga aacataatta
  1621 acccaattat atataagaaa ttcataccta atttttctgc aagtttagat agtgggatcg
  1681 ttaaactagc aaaaagtata gtatatatgt ttaatgccca agacaaatta gttagagtga
  1741 cgtgaagttc gttttgaata gctggcaatg caatattcat aacagttgta tctaacatac
  1801 ataagaaaat actaatacac attgcaatta ttattagaaa tttgtttttt cttttggtca
  1861 tacttgtttc ctcactttgt ttatattaac aatgttaata taaacaaaag aaaaataaat
  1921 gtcaacaata ttatcattgt aaatatgaac aatatgtatt aatataaata aaaattagtg
  1981 aggtgatttt atgacagctg taatagttgg aattggtatt actagttcct gtggagagtc
  2041 ctttacagaa attgaacaaa atgtaggtaa aggaaaaaca ggtatttcta atatcgatta
  2101 ttttgataca tctgagttaa catgtggaat tgctggtaac ttatcaaaga aaatatggaa
  2161 agaggttttg caaattgctg ataaaaatga attagattgg agtagtagtc tttcaattta
  2221 tactattcag cgattacttg aatcgtataa tatttcaaaa aaacaaagaa ttggtttatc
  2281 tcttggaaca tgtaatgggg gaattcattc tttagcagaa tatcttgata cttcaaatga
  2341 taaattttta aaaaattatc ctccgtacat tcagagtaaa gatatcgcac attatttcaa
  2401 ctttaacggg ccaaagtatt cttttaattc agcttgtgcg gctagtgcta atgcaatagc
  2461 ttatggagca gaaatgatta ataatagcga tgcagatctt gttgtgacgg gtggttgcga
  2521 tccaatgtca gaatgggttt ttgctgggtt taattcatta agaaccttta atagtaaaaa
  2581 ttgtatgcca tacggtgagg aatatggact taacctagga gaagctgcta catacttctt
  2641 attagaagat aaagataagg caattaaaaa agggcatagg atatatgcgg aaattttagg
  2701 gcacggctta tcaaatgatg cttatcatcc tacagcgcct gataaggatg gttcagggat
  2761 atcctatgca ataaaaatgg ctttaaaaaa ctcgggtctg aagcctgaag atattttata
  2821 tattaactct cacggaacag gaactaaagc caatgatagt gcagaataca gaggatttaa
  2881 aactgttttt agaaatgaga tgccttttat tagctcaatg aaaggatacg taggccataa
  2941 tctgggagca gctgctagta cagaattagc tataagttta atcggtatga atagtcagaa
  3001 agttttgtat cctaacttta atttaaccaa gtatagagaa gattgtaacg atgagcatat
  3061 cttaaaaaag ccttattcat tagatggata tgaagatatc aactttataa acaataatgc
  3121 tgcgtttggt ggacaaaatg ttgctgtaat tttccatgtt aatttagaag gaaaatatgg
  3181 tcatagtgaa aagaaactta aaacacagca acctatatat attaataatt ttggcgttgc
  3241 aagtgataaa gcttatatga caaagcatgg tattggtatt cttgacgatt tacgcccctt
  3301 aaagaaaaaa tatccaaaat tatataagcg acggatgaat atgttaactc aagtaagtat
  3361 tatcgcggct aaacaaacat tgcaggatca gtatagtaat tgtgggcttg tgtatggtac
  3421 gccttttggt agtctttcat caacactaaa atatgttgat tctattcaaa aatatgggtt
  3481 taaaaatgct agtggggcat attttccaga tttagttatt aattcaacga cggggcatat
  3541 ttgtcaagcg ctttcattga agagttatag ttcatctata agttcaggag gtgatgaaga
  3601 cttaagagcc ttaattattg cacataatgc gcttaataaa gggtacgctt caactatgtt
  3661 agttggagca ggccaagaag agacagaact gggcaataaa gtgttgaagc gtgaagttaa
  3721 taatcatgca acatttttaa gccttagtaa caaaaaaatg caagaaacaa tagcagaggt
  3781 tctatcttcc ggtgcaatgg gatttaaaaa taaaaaagag cttttgacca ttatacgatc
  3841 gaaaatagat gagaagttgg ctaatgatgc agatctaaaa gtgataattc aaaataatag
  3901 tgaaattacg aacgacgaat taataagtta tttcaagaat gataacaata tcagtataaa
  3961 ttctgataat tttgcggata gtaattttaa atcatttgtt aatcatagaa atgaaaatag
  4021 gttgttgctt gttggaattt cacaagtcaa tgatgtttcg tttgcagata ttaaaaaaat
  4081 aaaatagaga aagaggtaat actgatgaag catagtattg aagaaattaa ggatatttta
  4141 aaagaaaaag tattaattga acgattagag ttagatgatg tagaacccaa tgatatttca
  4201 gataatgaaa atttatttga tgaagaagga ctagcgttag attccgtgga agcattagat
  4261 atcatgacag gaattagtga agaatttggc attgacacat caatgttagg gcaggaagat
  4321 ataaaccatt ttcaaagcgt taatgatatg gctaaatata tctcagagaa tgaatagagg
  4381 atagttatga aatcagtact tatcacggga ataactggag gaataggaag aaaattaact
  4441 gaagcttatt cttcaaaggg atatcatatt tatggtacgt gtagtagaaa ttcagactct
  4501 ttacaacaat ttaaagagaa atggcctagt gttgaaataa ttcaaataaa tcatgatgac
  4561 ttgatagatg taagtacaga atattccttt ttttttagaa aagtgcaacc agatattgtt
  4621 attaacaatg ctggaatagt gaaagataat tttttagttc aaatgtcagt gaatgatttt
  4681 caagaagtgt tgactactaa tttgatttcg gcttgggtaa tagtcaaaga aatgctttta
  4741 catttaaatg ataataaaat tcataaaatc attaatgtag cttcaatatc tggaattata
  4801 gggcgtgaag gacagtgtaa ctatgcagca actaagggag gattagtagg cttatgtcaa
  4861 ttgatagaac atttagctcc gaaaggcagt aatgttattt cattttcagt tgcaccagga
  4921 ttaattgata cagatataaa gggaaaaatg ccaaagaaaa aaatcgataa tttaaagaag
  4981 gccacattgg caaataggct aggaacacca gaggaagtat caaaatttat ttttaaacta
  5041 tctgaagagg atatttcgta tagtgatgga actttatata ggattgatgg tggagtttta
  5101 aaatgaagat aataaataat acgattcaag taaccgactt gcttcaatca tatggaaaag
  5161 atgaaaaaga catagtaata attggtccca gcccatttaa tgaattagat tgccttaaag
  5221 aaacaaaaat aatcgataaa gttcagctta atttagagga agttttttca tttgtaaaaa
  5281 ataatagcgt tgctttaatg aaaaaaagaa gaggaaccat tgccttttta ttaaatccac
  5341 aaagttttga gggaggcaat aatatctatt ctccaatcta taattcagca attaagagct
  5401 ttttgaaatc cttatcgaag gaaatgaatc cattcagagt taaagttatg gggataatct
  5461 tacctttaac acaagataca aaatcgactc ggaaatatga tttagttaca ttaaagtaca
  5521 aaggaattaa taatgaaaag caggtacaag atattctaag cttacttaag ctttcagaaa
  5581 tactaaacgg acaaattgtc tcgctaggcg ctgaattgaa tctttagtaa aggagaggga
  5641 aatcatttta tttctagatc aaaatgcagt tataaaaatg ttgccgcaga aggagccatt
  5701 caggttctta gatacggttg aatgctttga tagagaaaaa cgtatgatta ctgcattgca
  5761 acaatttggt aatgaggaat tcttctttaa gggtcatttt ccaaataatc caatagttcc
  5821 aggggtactt ctaacagaat cgattgctca agcaggtttg atattgattt ctttattaga
  5881 aggccaaaaa gtgaaaattg gatatctagc ccaaattgaa aagacaaaat ttttcaaaga
  5941 ggtctatccc gacgagcaag taaaggttaa atgttcatta aagaaaaaaa taggtaaata
  6001 ctattacatt gcaggagaag tctactcgca gcaattaaat aaaagatgta tgagagcaac
  6061 agtaatagta tgtatttgat atggtgatgg ttcatgataa aaattactga aaatatagtt
  6121 caaataaaac taaagcaagg caaaaattat ccagacgtta atgtttatgt acttctaaaa
  6181 gaaaaagtgt taattgatat aggccccaaa tcaattaata cacttaacct tttaaaaaaa
  6241 gaattagcta ggttaggatt aagttttgaa acacttaatt taattattct aactcaccat
  6301 catgttgacc atgtaggact tttagagtac cttccctctg ggttacgtat cgttggacct
  6361 gatcatttag acttttatag ttcagatatt tataaaaaaa gtattcaaaa attgttagtt
  6421 gacgataatc tctctattga atttaaaaat gatatagaaa aacaacttac tactgaaata
  6481 attccaagta ttaatagaga aaactacgtt ccttttagtg agtcaaagaa aattttgcaa
  6541 caatttggtc ttacagctgt agagctatca ggtcattcta gtgaagatat tgtaattact
  6601 gattcagaaa ataactgttt tactggtgat attattattc ctaaaatttt ttttaactgt
  6661 atatatgagg ttgataaagt aaggcccaaa catcaacgtt ggtcatatta tcatgagctt
  6721 aattttttag acaggttagt aaacctagta ttgccaggac atggagatat tctaaagtta
  6781 gaagaattaa aaaaggcagt tttggttaat agaaaaagaa tgagacggac agagaaaaaa
  6841 ataataagag agttaaataa agaaacagtt aatggagtgg agaatgtttg tcgaagtgta
  6901 ttccaaagtt ttttgcctta tagcaaattc ttaccgtttt cagaagtagt tagtgttatc
  6961 gagagtaatg atgagagaat taactattga tattatttat ataaatacac taaataataa
  7021 cagctttgca agtttagatt ctagaaaaag aatcaaaaag ttacagcatc agctaggaca
  7081 atatatgctt tctcaaatat cttataaaaa aggttattca atttcccata gtcatatgtg
  7141 tgtagcctta gcaagttatg ttaatagggt tggtattgat attgaactta taaataaaac
  7201 aaagaaggca aggatacagt tcctttcgaa aagcgaaaaa caattagtaa atagatatgg
  7261 ttttacaaga atatggacac taaaggaagc tatagctaag tatcataccg ttgggttacc
  7321 tcggcttaat acagttgaga ttaaagaaat aaatgcttcg aacgttatct attttgttaa
  7381 taaagcacca agaaaattgc agtataaatt tttagatata atcccttctt ataggttgag
  7441 tgtagtggca aaaaaggtat caagtttttg cattagaatc acacaagaag aagatttgaa
  7501 ggggctaata aggagaatgt aattaatgca aggaagagac ataattctag gaatacttga
  7561 acgaaataat agaacaggat atgaaattaa tgatattttg aaaaatcaat tatcttattt
  7621 ctatgacgga acatatggaa tgatatatcc aacattacga aagcttgaaa aggaaggaaa
  7681 aataaaaaag gaaaaaattg tgcaaaatga taagccaaat aagaatgttt attctattac
  7741 agatacggga atagaagaat ttaaagaata cttggattct tctattcaag atgatattta
  7801 taaatcggac tttttaatgc gtctcttttt tggaaactca ttaccaaatc aagaaattat
  7861 tagagctatt aaacaagaga tacaacgtaa aaatgaaaag atagatcaat taactgtaaa
  7921 ttataaaaaa tggaaaaaaa atggaatgag taaaacacaa gaaataaccg tcaaatatgg
  7981 tattgcgcag tataccgcaa ttgttcagat gctgacaaaa gagcttgata cgttacgaag
  8041 aaatgagatg gatgattaat gtcattagga attatattta gtgggcaagg agcacaaaaa
  8101 tctaaaatgg gtcttgattt ttatgaagat ccactatttg ctgaattact taaccacgca
  8161 agtaatatat ctggtctaaa catgttaaaa atcttggaaa acaaaaataa tgagcttaca
  8221 gagactgtta atttacaacc aacattaaca acattgaatt atggcatata tcgaatgctg
  8281 aaaagggata tttttgatat gaaagtaagc tgtatggcag ggctttcttt aggagaatat
  8341 tctgcactga ttgcttctaa tgctttaact tttgaacagg gaatacaatt actagtagac
  8401 cgcggaaaat atatgcagga agcttcgaat agtaatgcag gaaaaatgtt agcacttata
  8461 aaacctaaac taaaagagat aactcaaatt tgtgctttgt gtaaggttga aattgctaat
  8521 tataattctc caaagcagat agtaataggc ggacaaaatt tgcaaattga atttgcaaag
  8581 aaaatgatta tggagcgtaa agctgcatta agaataattg agttagaagt aagtggcgcc
  8641 tttcatactt cgttattttc aaatgttcaa aaacaattgg aaaagcgatt aaaagatgtt
  8701 aaatttgaga atccacaaat tccggtagtt agtaatacta cagttgagga atttcaaaag
  8761 gaaagtctta cagccgtatt atcaaaacaa gttgctaatc ctacatattt tgaaaaagat
  8821 attaagttaa tgaaaaatac ttatggattg acacatatag ttcaaattgg tcctggtaag
  8881 gcattaagta attttgtgaa gcaaatgtca ttaggaatta agacatataa tatttctaat
  8941 ataaaagact atagaaaatt tctgaatagt tatagagata ttaatttgaa aggaaagaaa
  9001 aatggatttt gagaaaattc agcaactaat tcaaatgttt gaaagctcta atacaagaga
  9061 actaaaaata gatgataata actttcacat ttatcttaca aaaaacgtaa gtaaagaacc
  9121 aattcacgat ataaaatttg aatcgaataa aattcagcaa gcctcagagg caaaagcaaa
  9181 caggaaaacg ataacagccc cattggttgg aacagtttat ttagcctctt ctcctacgtc
  9241 taaaccgtat gttcaagtag ggagccatat tgataaagga gatacagtgt gtgtaataga
  9301 ggctatgaag ctaatgacgg aaataaaaag tgaggttacc ggaacaattg aaaaagttaa
  9361 tgtagagaat ggagaattag ttgaagttgg gcaaccgtta ttttcagttt ctggagaaaa
  9421 agaaagttaa tgaaagagtg aggtgtagtg atgttttcta aagtactagt tgctaatcgt
  9481 ggagaaatag ctgttcgtat tattagaact cttcatgaat tgggcattaa agcggtagct
  9541 atttattcga ttgttgatca agaaagtctt catgttcaat tggctgatga agcagtttgt
  9601 gtaggtggag cacgaccaca ggattcgtat ttaaatacta ctaatatttt aacagcagca
  9661 attggaacag gagcacaagc gatacaccct ggctttggat tcctttcaga aaacgctgag
  9721 tttgcaagaa tgtgtgaaaa atgcggaata gtatttatag gtccgcgtgc tgctacgatt
  9781 gatttaatgg gaaataaaga aaatgcgcgc gagactatgc aaaagagagg gatacctgtt
  9841 attcctggaa gtagttccta cataacaaac agttatgatg caaaaagagt tgcagataaa
  9901 ataggatatc ctattttaat aaaggcggca gctgggggtg gaggtaaagg tattagaaga
  9961 gttgtaacgc ctgagcaaat gaaacaagaa tttaataatg cgcaaagaga agctcgtata
10021 tcatttggtg atgatcgtat gtaccttgaa aaaataatgt gcaatgttaa acatattgaa
10081 gtacaggtag ttcgtgatag attcggaaat agtgtctatt ttccagaacg cgattgttca
10141 ctccaacggg ataagcaaaa aattatagaa gagagtccat gctcggttat caattcagaa
10201 caaagaaaaa ttttaggaag gtatgctatt aaagcaattg aagcagttga ttatcttaat
10261 acaggaacta ttgaattttt gatggataaa aataataaat tttattttat ggaaatgaat
10321 actcgtattc aagttgaaca tactgtaact gagatggtaa cgggaataga tctagtaaag
10381 gtacaactga tgatcgcttc aggtgaggaa cttccttttt cacaaaataa tattaagtta
10441 aatggggtag ctattgagtg tagaattaat gcagaagatc ctaaaaataa ctttgttcct
10501 tcaactggaa aaataaatta tttatattta cctgtaggta acttgggtat gagaattgat
10561 actgcacttt actctggaga aaagataaca ccattttatg attcaatgat tgcaaaagta
10621 atctcgcatg gccatactcg cgtagaagcg atcaatagaa tgaagaggtt aatgcaagaa
10681 ctggttataa aaggtgttaa aacaaataaa gatcttcact tatcaatttt gggagattca
10741 agttttttga aagatacagt aacaactgag tatttagaga aaaacttttt accaatctgg
10801 aaagagaggg agaaaaatgc agctgtatga aagtgcaacg ttaactaagc aacatgtaaa
10861 ggcgaatatt aaagcaaatc aaaaagtacc tgatgggatg ttaaaaaaat gtcctaagtg
10921 tgggaaaatc tttctgtcta cagaatttga taagtatttt tcgtgtcctg gttgtaatta
10981 tggatttagg attggttcat ggcaaagggt agcctgggcg gttgatgaat tttatgaaga
11041 ggatggttca cgagaactaa taacctcaga tcctttacat tttcctaatt atgtaaaaaa
11101 gattcaagga cttcaaaaga ctactaaggt aaatgaagca gttttaacgg gtaaagctaa
11161 aataaaagac caaatttttg agtgtggcat tatggatcct cactttataa tgggatcatt
11221 aggaacaatt actggcgaaa agattacgag attatttgaa cgtgctacaa aggagaggtt
11281 gcctgttgtc ctatggactg cttcaggggg agctagaatg caagaaggaa ttatgtcatt
11341 aatgcagatg gcaaaaataa gtcaagctat agcacaacat gcatcgaaag gacttttata
11401 cattgttatt ttaactgatc caacaacagg tggagtaaca gcaagttttg caatgcaagg
11461 agacattatt ttagcagagc cacatacttt agtaggattt gcagggcggc gagttattga
11521 gcaaactatt catgagagaa tcccagatac gttacaggat gcggagaatg taataaaaca
11581 tggattcata gatttaatag tatctcggag tgaagaaaaa tctttacttt ataaattgtt
11641 aaaatatggt aggtgataat aatggcaact gagaatgcaa tggcaattgt aaaagctgct
11701 cgaagtgata ataaaataac tgctaaagaa attatagaag aagtattttc agattttatt
11761 gaattccatg gtgatcgtaa aggaacagat gattcagcaa ttcttggagg attggcaata
11821 ctttcatcta caccagtaac agtaattgcg actaataggg gggaaacagt tggtgaacat
11881 ttgagtacac attttgggtg tccaactcca ggtggctatc gtaaagcttt gcgtttagca
11941 aagcaggctg caaagtttaa tagaccaatt atatttttag taaatactcc tggagcttat
12001 ccagggaaaa cagctgaaga acaagggcaa ggatctgcga ttgcgcaaaa tattatccaa
12061 ataagtcaac ttccagttcc aattattact attatttatg gtgaaggtgg cagtggaggt
12121 gcattagcat tggcttgcgg tgatcaggtg tggatgctag agaatagtac atattcaatt
12181 ttatcacctg agggttttgc ctctatttta tggaaagatg gatcacgtac agaagaagcc
12241 gcagaattaa tgcaaatgac cccaaaagcc ttgctaagac ataaggttat tgaaggaata
12301 attccagaaa gtaaagatca caaagtaaca tgtcgagcaa ttgctaatat tttagataaa
12361 cagttacaag aattaggaaa actttcagcg gtagatttat tgattcaacg aaaaaaaga
12421 tatagaaaat tttagttagt atagtaagag gagagaatac attacggtgc acgacttatt
12481 atcgcttaat agaattaaag aattatataa agagaaagca atgacaaatt gcaacttttt
12541 ttactttaat aaagtagatt ctactcaaaa aatagcaaaa tattttttag accatttaaa
12601 tatcaataaa ccatgtacta tttttgctgg aagtcaaacg agaggctatg gtaaaagaaa
12661 taggctattt tattcaccac aaaattcggg gatttatatg agtataatta ttccacaata
12721 cgaaatgcaa aatgaggata ttggtttatt aacaatttca ttagggagtg gaatactaga
12781 agttttaaag aagtattatc ctaaaaaaat tttttattta aaatgggtaa atgatattct
12841 attaggcaag gtgaactact cggccataaa tgaccgagct tctgggaaca cgaagtagta
12901 tttaggatat tacacaagta ttcttgctac ctaacttaca gaactccgtt cttttaccaa
12961 ggctagttc
```

[0543] The amino acid sequences for the PKS gene cluster proteins noted in Table 16 and encoded by the gene cluster are provided below. Annotations providing their locations in the 12,969 bp cluster sequence referenced above and corresponding to genome map locations are also indicated.

| LOCUS | PKS_encoding_region 12969 bp DNA |
|---|---|
| DEFINITION | Lactobacillus reuteri strain 3632. |
| SOURCE | Lactobacillus reuteri |
| ORGANISM | Lactobacillus reuteri |
| FEATURES | Location/Qualifiers |
| source | join(11662 . . . >12969, <1 . . . 11661) |
| | /organism = “Lactobacillus reuteri” |
| | /mol_type = “genomic DNA” |
| | /strain = 3632 |
| CDS | complement(176 . . . 1861) |
| | /gene = “emrY” |
| | /locus_tag = “LREU3632_02405” |
| | /inference = “ab initio prediction:Prodigal:2.6” |
| | /inference = “similar to AA sequence:UniProtKB:P52600” |
| | /product = “putative multidrug resistance protein EmrY” |
| | /translation = “MTKRKNKFLIIIAMCISIFLCMLDTTVMNIALPAIQNELHVTLT |
| | NLSWALNIYTILFASLTIPLSKLAEKLGMNFLYIIGLIMFLIGSSISGISPNLAILIL |
| | GRGIQSLGAAILFPLSMTIGINIVTVKTRKKVIAALGITQGLAAALGPSIGGILTQFM |
| | GWHSIFSVNIPFTILSLVICLSTFNFHEPKSNEGNDYLGSLLGIILLSALTLILTQGR |
| | SWGWKSPAINLLFFIFILTFILFLITEHYAKAPMIPLVLFKNREFTGSAVSIILSNLF |
| | LVAVTVILPTYFTHIQHRTELEAALLITPITGMIFIMSPLSAILLDKLGSRAIILSGF |
| | LLMGISYYLFTHIDMDNITLIIFTCIILGTGYGIIAGPITVLAASNFEGYLLTASQSV |
| | AGVLRQVGVSLAVAIFLTGLYGNLNTAKHNSISYINQQVNNLNIPKYQKNKIRDNSIK |
| | SLNNNSNSRTPSKHFSKKLIKETTDKEYTKQINSLPYEPSKIQEKEIYSHTKANVKLV |
| | FHRLNNSINITIKKIKTYANSQYSTAFIKLYKVSLPFLIFSCLSCLLFPKRKK” (SEQ ID NO: 78) |
| | /label = “emrY CDS” |
| CDS | 1991 . . . 4087 |
| | /gene = “fabF_2” |
| | /locus_tag = “LREU3632_02406” |
| | /EC_number = “2.3.1.179” |
| | /inference = “ab initio prediction:Prodigal:2.6” |
| | /inference = “similar to AA sequence:UniProtKB:Q9KQH9” |
| | /product = “3-oxoacyl-[acyl-carrier-protein] synthase 2” |
| | /translation = “MTAVIVGIGITSSCGESFTEIEQNVGKGKTGISNIDYFDTSELT |
| | CGIAGNLSKKIWKEVLQIADKNELDWSSSLSIYTIQRLLESYNISKKQRIGLSLGTCN |
| | GGIHSLAEYLDTSNDKFLKNYPPYIQSKDIAHYFNFNGPKYSFNSACAASANAIAYGA |
| | EMINNSDADLVVTGGCDPMSEWVFAGFNSLRTFNSKNCMPYGEEYGLNLGEAATYFLL |
| | EDKDKAIKKGHRIYAEILGHGLSNDAYHPTAPDKDGSGISYAIKMALKNSGLKPEDIL |
| | YINSHGTGTKANDSAEYRGFKTVFRNEMPFISSMKGYVGHNLGAAASTELAISLIGMN |
| | SQKVLYPNFNLTKYREDCNDEHILKKPYSLDGYEDINFINNNAAFGGQNVAVIFHVNL |
| | EGKYGHSEKKLKTQQPIYINNFGVASDKAYMTKHGIGILDDLRPLKKKYPKLYKRRMN |
| | MLTQVSIIAAKQTLQDQYSNCGLVYGTPFGSLSSTLKYVDSIQKYGFKNASGAYFPDL |
| | VINSTTGHICQALSLKSYSSSISSGGDEDLRALIIAHNALNKGYASTMLVGAGQEETE |
| | LGNKVLKREVNNHATFLSLSNKKMQETIAEVLSSGAMGFKNKKELLTIIRSKIDEKLA |
| | NDADLKVIIQNNSEITNDELISYFKNDNNISINSDNFADSNFKSFVNHRNENRLLLVG |
| | ISQVNDVSFADIKKIK” (SEQ ID NO: 79) |
| | /label = “fabF 2 CDS” |
| CDS | 4105 . . . 4377 |
| | /locus_tag = “LREU3632_02407” |
| | /inference = “ab initio prediction:Prodigal:2.6” |
| | /inference = “protein motif:CLUSTERS:PRK09184” |
| | /product = “acyl carrier protein” |
| | /translation = “MKHSIEEIKDILKEKVLIERLELDDVEPNDISDNENLFDEEGLA |
| | LDSVEALDIMTGISEEFGIDTSMLGQEDINHFQSVNDMAKYISENE” (SEQ ID NO: 80) |
| | /label = “acyl carrier protein CDS” |
| CDS | 4387 . . . 5106 |
| | /gene = “fabG_2” |
| | /locus_tag = “LREU3632_02408” |
| | /EC_number = “1.1.1.100” |
| | /inference = “ab initio prediction:Prodigal:2.6” |
| | /inference = “similar to AA sequence:UniProtKB:067610” |
| | /product = “3-oxoacyl-[acyl-carrier-protein] reductase FabG” |
| | /translation = “MKSVLITGITGGIGRKLTEAYSSKGYHIYGTCSRNSDSLQQFKE |
| | KWPSVEIIQINHDDLIDVSTEYSFFFRKVQPDIVINNAGIVKDNFLVQMSVNDFQEVL |
| | TTNLISAWVIVKEMLLHLNDNKIHKIINVASISGIIGREGQCNYAATKGGLVGLCQLI |
| | EHLAPKGSNVISFSVAPGLIDTDIKGKMPKKKIDNLKKATLANRLGTPEEVSKFIFKL |
| | SEEDISYSDGTLYRIDGGVLK” (SEQ ID NO: 81) |
| | /label = “fabG 2 CDS” |
| CDS | 5103 . . . 5627 |
| | /locus_tag = “LREU3632_02409” |
| | /inference = “ab initio prediction:Prodigal:2.6” |
| | /product = “hypothetical protein” |
| | /translation = “MKIINNTIQVTDLLQSYGKDEKDIVIIGPSPFNELDCLKETKII |
| | DKVQLNLEEVFSFVKNNSVALMKKRRGTIAFLLNPQSFEGGNNIYSPIYNSAIKSFLK |
| | SLSKEMNPFRVKVMGIILPLTQDTKSTRKYDLVTLKYKGINNEKQVQDILSLLKLSEI |
| | LNGQIVSLGAELNL” (SEQ ID NO: 82) |
| | /label = “hypothetical protein CDS” |
| CDS | 5744 . . . 6079 |
| | /gene = “fabZ_3” |
| | /locus_tag = “LREU3632_02410” |
| | /EC_number = “4.2.1.59” |
| | /inference = “ab initio prediction:Prodigal:2.6” |
| | /inference = “similar to AA sequence:UniProtKB:P64107” |
| | /product = “3-hydroxyacyl-[acyl-carrier-protein] dehydratase FabZ” |
| | /translation = “MITALQQFGNEEFFFKGHFPNNPIVPGVLLTESIAQAGLILISL |
| | LEGQKVKIGYLAQIEKTKFFKEVYPDEQVKVKCSLKKKIGKYYYIAGEVYSQQLNKRC |
| | MRATVIVCI” (SEQ ID NO: 83) |
| | /label = “fabZ 3 CDS” |
| CDS | 6094 . . . 6990 |
| | /locus_tag = “LREU3632_02411” |
| | /inference = “ab initio prediction:Prodigal:2.6” |
| | /inference = “protein motif:Pfam:PF00753.21” |
| | /product = “Metallo-beta-lactamase superfamily protein” |
| | /translation = “MIKITENIVQIKLKQGKNYPDVNVYVLLKEKVLIDIGPKSINTL |
| | NLLKKELARLGLSFETLNLIILTHHHVDHVGLLEYLPSGLRIVGPDHLDFYSSDIYKK |
| | SIQKLLVDDNLSIEFKNDIEKQLTTEIIPSINRENYVPFSESKKILQQFGLTAVELSG |
| | HSSEDIVITDSENNCFTGDIIIPKIFFNCIYEVDKVRPKHQRWSYYHELNFLDRLVNL |
| | VLPGHGDILKLEELKKAVLVNRKRMRRTEKKIIRELNKETVNGVENVCRSVFQSFLPY |
| | SKFLPFSEVVSVIESNDERINY” (SEQ ID NO: 84) |
| | /label = “Metallo-beta-lactamase superfamily protein CDS” |
| CDS | 6971 . . . 7522 |
| | /locus_tag = “LREU3632_02412” |
| | /inference = “ab initio prediction:Prodigal:2.6” |
| | /product = “hypothetical protein” |
| | /translation = “MRELTIDIIYINTLNNNSFASLDSRKRIKKLQHQLGQYMLSQIS |
| | YKKGYSISHSHMCVALASYVNRVGIDIELINKTKKARIQFLSKSEKQLVNRYGFTRIW |
| | TLKEAIAKYHTVGLPRLNTVEIKEINASNVIYFVNKAPRKLQYKFLDIIPSYRLSVVA |
| | KKVSSFCIRITQEEDLKGLIRRM” (SEQ ID NO: 85) |
| | /label = “hypothetical protein CDS” |
| CDS | 7526 . . . 8059 |
| | /locus_tag = “LREU3632_02413” |
| | /inference = “ab initio prediction:Prodigal:2.6” |
| | /inference = “protein motif:Pfam:PF03551.8” |
| | /product = “Transcriptional regulator PadR-like family protein” |
| | /translation = “MQGRDIILGILERNNRTGYEINDILKNQLSYFYDGTYGMIYPTL |
| | RKLEKEGKIKKEKIVQNDKPNKNVYSITDTGIEEFKEYLDSSIQDDIYKSDFLMRLFF |
| | GNSLPNQEIIRAIKQEIQRKNEKIDQLTVNYKKWKKNGMSKTQEITVKYGIAQYTAIV |
| | QMLTKELDTLRRNEMDD” (SEQ ID NO: 86) |
| | /label = “Transcriptional regulator PadR-like family protein |
| | CDS” |
| CDS | 8059 . . . 9012 |
| | /gene = “baeC” |
| | /locus_tag = “LREU3632_02414” |
| | /EC_number = “2.3.1.39” |
| | /inference = “ab initio prediction:Prodigal:2.6” |
| | /inference = “similar to AA sequence:UniProtKB:A7Z4X8” |
| | /product = “Polyketide biosynthesis malonyl CoA-acyl carrier protein |
| | transacylase BaeC” |
| | /translation = “MSLGIIFSGQGAQKSKMGLDFYEDPLFAELLNHASNISGLNMLK |
| | ILENKNNELTETVNLQPTLTTLNYGIYRMLKRDIFDMKVSCMAGLSLGEYSALIASNA |
| | LTFEQGIQLLVDRGKYMQEASNSNAGKMLALIKPKLKEITQICALCKVEIANYNSPKQ |
| | IVIGGQNLQIEFAKKMIMERKAALRIIELEVSGAFHTSLFSNVQKQLEKRLKDVKFEN |
| | PQIPVVSNTTVEEFQKESLTAVLSKQVANPTYFEKDIKLMKNTYGLTHIVQIGPGKAL |
| | SNFVKQMSLGIKTYNISNIKDYRKFLNSYRDINLKGKKNGF” (SEQ ID NO: 87) |
| | /label = “baeC CDS” |
| CDS | 9002 . . . 9430 |
| | /gene = “accB_2” |
| | /locus_tag = “LREU3632_02415” |
| | /inference = “ab initio prediction:Prodigal:2.6” |
| | /inference = “similar to AA sequence:UniProtKB:P0ABD8” |
| | /product = “Biotin carboxyl carrier protein of acetyl-CoA carboxylase” |
| | /translation = “MDFEKIQQLIQMFESSNTRELKIDDNNFHIYLTKNVSKEPIHDI |
| | KFESNKIQQASEAKANRKTITAPLVGTVYLASSPTSKPYVQVGSHIDKGDTVCVIEAM |
| | KLMTEIKSEVTGTIEKVNVENGELVEVGQPLFSVSGEKES” (SEQ ID NO: 88) |
| | /label = “accB 2 CDS” |
| CDS | 9451 . . . 10830 |
| | /gene = “cfiB_2” |
| | /locus_tag = “LREU3632_02416” |
| | /EC_number = “6.4.1.7” |
| | /inference = “ab initio prediction:Prodigal:2.6” |
| | /inference = “similar to AA sequence:UniProtKB:D3DJ42” |
| | /product = “2-oxoglutarate carboxylase small subunit” |
| | /translation = “MFSKVLVANRGEIAVRIIRTLHELGIKAVAIYSIVDQESLHVQL |
| | ADEAVCVGGARPQDSYLNTTNILTAAIGTGAQAIHPGFGFLSENAEFARMCEKCGIVF |
| | IGPRAATIDLMGNKENARETMQKRGIPVIPGSSSYITNSYDAKRVADKIGYPILIKAA |
| | AGGGGKGIRRVVTPEQMKQEFNNAQREARISFGDDRMYLEKIMCNVKHIEVQVVRDRF |
| | GNSVYFPERDCSLQRDKQKIIEESPCSVINSEQRKILGRYAIKAIEAVDYLNTGTIEF |
| | LMDKNNKFYFMEMNTRIQVEHTVTEMVTGIDLVKVQLMIASGEELPFSQNNIKLNGVA |
| | IECRINAEDPKNNFVPSTGKINYLYLPVGNLGMRIDTALYSGEKITPFYDSMIAKVIS |
| | HGHTRVEAINRMKRLMQELVIKGVKTNKDLHLSILGDSSFLKDTVTTEYLEKNFLPIW |
| | KEREKNAAV” (SEQ ID NO: 89) |
| | /label = “cfiB 2 CDS” |
| CDS | 10817 . . . 11656 |
| | /gene = “accD_2” |
| | /locus_tag = “LREU3632_02417” |
| | /EC_number = “6.4.1.2” |
| | /inference = “ab initio prediction:Prodigal:2.6” |
| | /inference = “similar to AA sequence:UniProtKB:P0CC08” |
| | /product = “Acetyl-coenzyme A carboxylase carboxyl transferase subunit beta” |
| | /translation = “MQLYESATLTKQHVKANIKANQKVPDGMLKKCPKCGKIFLSTEF |
| | DKYFSCPGCNYGFRIGSWQRVAWAVDEFYEEDGSRELITSDPLHFPNYVKKIQGLQKT |
| | TKVNEAVLTGKAKIKDQIFECGIMDPHFIMGSLGTITGEKITRLFERATKERLPVVLW |
| | TASGGARMQEGIMSLMQMAKISQAIAQHASKGLLYIVILTDPTTGGVTASFAMQGDII |
| | LAEPHTLVGFAGRRVIEQTIHERIPDTLQDAENVIKHGFIDLIVSRSEEKSLLYKLLK |
| | YGR” (SEQ ID NO: 90) |
| | /label = “accD 2 CDS” |
| CDS | 11680 . . . 12435 |
| | /gene = “accA_2” |
| | /locus_tag = “LREU3632_02261” |
| | /EC_number = “6.4.1.2” |
| | /inference = “ab initio prediction:Prodigal:2.6” |
| | /inference = “similar to AA sequence:UniProtKB:Q9FBB7” |
| | /product = “Acetyl-coenzyme A carboxylase carboxyl transferase subunit alpha” |
| | /translation = “MAIVKAARSDNKITAKEIIEEVFSDFIEFHGDRKGTDDSAILGG |
| | LAILSSTPVTVIATNRGETVGEHLSTHFGCPTPGGYRKALRLAKQAAKFNRPIIFLVN |
| | TPGAYPGKTAEEQGQGSAIAQNIIQISQLPVPIITIIYGEGGSGGALALACGDQVWML |
| | ENSTYSILSPEGFASILWKDGSRTEEAAELMQMTPKALLRHKVIEGIIPESKDHKVTC |
| | RAIANILDKQLQELGKLSAVDLLIQRKERYRKF” (SEQ ID NO: 91) |
| | /label = “accA 2 CDS” |
| CDS | 12467 . . . 12898 |
| | /locus_tag = “LREU3632_02262” |
| | /inference = “ab initio prediction:Prodigal:2.6” |
| | /inference = “protein motif:CLUSTERS:PRK11886” |
| | /product = “bifunctional biotin--[acetyl-CoA-carboxylase] |
| | synthetase/biotin operon repressor” |
| | /translation = “MHDLLSLNRIKELYKEKAMTNCNFFYFNKVDSTQKIAKYFLDHL |
| | NINKPCTIFAGSQTRGYGKRNRLFYSPQNSGIYMSIIIPQYEMQNEDIGLLTISLGSG |
| | ILEVLKKYYPKKIFYLKWVNDILLGKVNYSAINDRASGNTK” (SEQ ID NO: 92) |
| | /label = “bifunctional biotin--[acetyl-CoA-carboxylase] |
| | synthetase/biotin operon repressor CDS” |

[0544] This invention may be embodied in other forms or carried out in other ways without departing from the spirit or essential characteristics thereof. The present disclosure is therefore to be considered as in all aspects illustrated and not restrictive, the scope of the invention being indicated by the appended Claims, and all changes which come within the meaning and range of equivalency are intended to be embraced therein.

[0545] Various references are cited throughout this Specification, each of which is incorporated herein by reference in its entirety.

1. (canceled)

2. (canceled)

3. (canceled)

4. (canceled)

5. (canceled)

6. (canceled)

7. (canceled)

8. (canceled)

9. (canceled)

10. A method for reducing intestinal permeability, alleviating alcohol induced or disease related leaky gut syndrome, alleviating the intestinal and systemic effects of chronic alcohol consumption, including intestinal dysbiosis, and/or reducing inflammation, including intestinal-derived or intestinal-associated inflammation, comprising administering an effective amount of an immunogenic probiotic composition comprising at least one of an isolated first Lactobacillus reuteri strain and an isolated second Lactobacillus reuteri strain wherein:
(a) the isolated first Lactobacillus reuteri strain has a genomic nucleic acid sequence including at least one of SEQ ID NOs: 49-55, sequences having one or more nucleic acid sequence difference from the sequence of at least one of SEQ ID NOs: 49-55, sequences having at least one nucleic acid sequence difference from the sequence of at least one of SEQ ID NOs: 49-55 and further having at least 97%, at least 98%, at least 99% or at least 99.5% sequence identity with one or more of SEQ ID NOs: 49-55, sequences having at least 98%, at least 98.5%, at least 99%, or at least 99.5% sequence identity to SEQ ID NOs: 49-55, and/or
the isolated second Lactobacillus reuteri strain has a genomic nucleic acid sequence including at least one of SEQ ID NOs: 44-48, sequences having one or more nucleic acid sequence difference from the sequence of at least one of SEQ ID NOs: 44-48, sequences having at least one nucleic acid sequence difference from the sequence of at least one of SEQ ID NOs: 44-48 and further having at least 97%, at least 98%, at least 99% or at least 99.5% sequence identity with one or more of SEQ ID NOs: 44-48, sequences having at least 98%, at least 98.5%, at least 99%, or at least 99.5% sequence identity to SEQ ID NOs: 44-48; or
(b) the isolated first Lactobacillus reuteri strain comprises or has a genomic nucleic acid sequence corresponding to the genomic nucleic acid sequence of ATCC strain PTA-126788, or a variant thereof comprising or having a nucleic acid sequence at least 98%, at least 98.5%, at least 99%, or at least 99.5% sequence identity to the genomic nucleic acid sequence of ATCC strain PTA-126788, or is Lactobacillus reuteri strain 3632, which corresponds to ATCC Patent Deposit Number PTA-126788; and/or
the isolated second Lactobacillus reuteri strain comprises or has a genomic nucleic acid sequence corresponding to the genomic nucleic acid sequence of ATCC strain PTA-126787, or a variant thereof comprising or having a nucleic acid sequence at least 98%, at least 98.5%, at least 99%, or at least 99.5% sequence identity to the genomic nucleic acid sequence of ATCC strain PTA-126787, or is Lactobacillus reuteri strain 3630, which corresponds to ATCC Patent Deposit Number PTA-126787.

11. The A method of claim 10 wherein the production or expression of one or more proinflammatory cytokine and/or for increasing the production or expression of one or more anti-inflammatory cytokine in the intestine of an animal.

12. The method of claim 10, wherein an isolated first Lactobacillus reuteri strain and an isolated second Lactobacillus reuteri strain are administered.

13. The method of claim 11, wherein the production or expression of one or more proinflammatory cytokine selected from IL-6, TNF-α, IFN-γ and IL-1, including IL-1β, is decreased in the intestine or gastrointestinal system of an animal, and/or wherein the production or expression of one or more anti-inflammatory cytokine selected from IL-10 and IL-22 is increased in the intestine or gastrointestinal system of an animal.

14. (canceled)

15. (canceled)

16. (canceled)

17. (canceled)

18. The method of claim 10, wherein the intestinal-derived or intestinal-associated inflammation is associated with gastrointestinal disease selected from inflammatory bowel disease (IBD), Crohn's disease, and celiac disease.

19. The method of claim 10, comprising further administering one or more anti-inflammatory agent, molecule or cytokine to a subject or animal.

20. (canceled)

21. The method of claim 192, wherein the one or more anti-inflammatory agent, molecule or cytokine is selected from one or more anti-inflammatory, nonsteroidal anti-inflammatory drug (NSAID), steroid, biologic, antibiotic, or anti-diarrheal agent.

22. (canceled)

23. The method of claim 10, further comprising administering an effective amount of a prebiotic, wherein the prebiotic is selected from mannan-oligosaccharides, fructo-oligosaccharides, galacto-oligosaccharides, chito-oligosaccharides, isomalto-oligosaccharides, pectic-oligosaccharides, xylo-oligosaccharides, and lactose-oligosaccharides.

24. (canceled)

25. The method of claim 10, wherein the composition or strains comprises a ratio of isolated first Lactobacillus reuteri strain to isolated second Lactobacillus reuteri strain of 0.75-1.5:1, or wherein the composition or strains comprises about equal amounts of the isolated first Lactobacillus reuteri strain and the isolated second Lactobacillus reuteri strain.

26. (canceled)

27. The method of claim 10, wherein the composition or strains are formulated as animal feed, feed additive, food ingredient, water additive, water-mixed additive, consumable solution, consumable spray additive, consumable solid, consumable gel, injection, or combinations thereof.

28. (canceled)

29. The method of claim 10, wherein the composition comprises the isolated first Lactobacillus reuteri strain in an amount of about 10²-10⁸ CFU/kg of the composition, about 10⁴-10⁷ CFU/kg of the composition, or about 10³-10⁵ CFU/kg of the composition, and/or comprises the isolated second Lactobacillus reuteri strain in an amount of about 10²-10⁸ CFU/kg of the composition, about 10⁴-10⁷ CFU/kg of the composition, or about 10³-10⁵ CFU/kg of the composition.

30. (canceled)

31. The method of claim 10, wherein the composition comprises the isolated first Lactobacillus reuteri strain in an amount of about 10⁷ CFU/kg of the composition, and/or the isolated second Lactobacillus reuteri strain in an amount of about 10⁷ CFU/kg of the composition.

32. (canceled)

33. The composition method of claim 10, wherein the animal is a bird, a human, or a non-human mammal.

34. The method of claim 33, wherein the animal is a farm animal or food production animal, a domestic animal, or wherein the bird is poultry.

35. (canceled)

36. (canceled)

37. The method of claim 10, wherein the composition or strains are administered orally or by injection, optionally by food administration or as a food or feed additive, or by direct ingestion in a powder, liquid, emulsion or pill.

38. (canceled)

39. (canceled)

40. The method of claim 10, wherein the composition or strains are administered by in ovo administration, or by spray administration.

41. (canceled)

42. (canceled)

43. An isolated biosynthetic gene cluster (BGC), particularly a polyketide synthase (PKS) BGC, capable of producing an AhR-activating metabolite.

44. The biosynthetic gene cluster (BGC) of claim 43, wherein the PKS BGC comprises the nucleic acid set out in SEQ ID NO: 77, wherein the PKS BGC comprises nucleic acid encoding one or more polypeptide selected from SEQ ID NOs: 78-85 and 87-92, or wherein the PKS BGC comprises nucleic acid encoding the polypeptides SEQ ID NOs: 78-85 and 87-92.

45. (canceled)

46. (canceled)

47. The biosynthetic gene cluster (BGC) of claim 43 comprising an Ahr-metabolite synthesizing cluster of genes encoding proteins SEQ ID NO: 78-85 and SEQ ID NO: 86-92.

48. An isolated plasmid comprising nucleic acid encoding one or more polypeptide selected from SEQ ID NOs: 78-92.

49. (canceled)

50. The plasmid of claim 48, wherein the encoded polypeptides are capable of synthesizing an Ahr-metabolite.

51. The biosynthetic gene cluster (BGC) of claim 47, wherein the Ahr-metabolite is capable of increasing IL-22 levels in the intestine in an animal, wherein the Ahr-metabolite is capable of ameliorating or reducing intestinal inflammation, or wherein the Ahr-metabolite is capable of reducing or alleviating increased intestinal permeability.

52. (canceled)

53. (canceled)

54. A method for expressing or producing an Ahr-metabolite via controlled expression or inducible expression of the PKS gene cluster of claim 43.

55. (canceled)

The application's sequence listing, which the Patent Office published only in electronic form, follows.

SEQUENCE LISTING (92 sequences)

SEQ ID NO: 1 - DNA, 231 bp, Lactobacillus reuteri
  misc_feature 1..231: note = Description of sequence: mersacidin-E1 cDNA
  source 1..231: mol_type = genomic DNA
atggacaaagaagaattagaaaaaattgtaggtaataactttgaggaaatgagtttacaaaaaatgacagaaattcaaggtatgggtgaataccaagtggattcaacaccagcagcttctgcgatttcacgggcaacaattcaagtatcacgtgcatcttctggaaaatgtctaagttggggtagtggtgcagcatttagtgcttattttactcataaaagatggtgctag

SEQ ID NO: 2 - protein, 76 aa, Lactobacillus reuteri
  REGION 1..76: note = Description of sequence: mersacidin-E1 amino acid (natural)
MDKEELEKIVGNNFEEMSLQKMTEIQGMGEYQVDSTPAASAISRATIQVSRASSGKCLSWGSGAAFSAYFTHKRWC

SEQ ID NO: 3 - DNA, 186 bp, Lactobacillus reuteri
  misc_feature 1..186: note = Description of sequence: mersacidin-E2 cDNA
  source 1..186: mol_type = genomic DNA
atggaagaaaaagaattagaaggtgtaatagggaattcgtttgaaagtatgactgtagaggaaatgacaaaaattcaaggtatgggtgaatatcaagtagattcgacgcctggatattttatggaaagtgctgccttttcagctcttacagccaatataacaagacatgctatgcatcatcattaa

SEQ ID NO: 4 - protein, 61 aa, Lactobacillus reuteri
  REGION 1..61: note = Description of sequence: mersacidin-E2 amino acid (natural)
MEEKELEGVIGNSFESMTVEEMTKIQGMGEYQVDSTPGYFMESAAFSALTANITRHAMHHH

SEQ ID NO: 5 - protein, 373 aa, Lactobacillus reuteri
  REGION 1..373: note = Description of sequence: Capreomycidine synthase (natural)
MVEIAHFGVEAWLNKWEKSATYDISQSTIASLSMHDLLNLDGNNGEEFYEMLDKQQMNYGWIEGSPEFKEEVAKLYHHVDPENILQTNGATGANILALYALINPGDHVIAEYPSYQQLYDIPKSLGADVDYWHIHEEDNWYPRIDDLKAMVKPNTKMICLNNANNPTGTVLDKEFLEQVVEIAKSVDAYVLVDEVYLPLDHPEKFAQIIDLYDKGISTNSLSKTYSVPGVRIGWTATNAEVADIFRKFRDYTMICGGVFNDQLATYVLRHRDQVLARNRKLVLGNLAIYKDWIDHEDRASVIMPQAVSTSFPKLDVPVDIHTFCENLLHDEGVLLVPGDAFDTPGHVRLGYCAPEATLKEGLKRLSKYMHQYD

SEQ ID NO: 6 - protein, 178 aa, Lactobacillus reuteri
  REGION 1..178: note = Description of sequence: Colicin V production protein (natural)
MILTTFIILILMGCFINGHRRGLLTMTLMLGTYIVAWIVARQGAQLIGGWLKSLLPSIGTPATFSESLLANVNSNLFFYNGIAFMIIFTIVSILCHWGIRQLNWIKRIPVVGTVDKIAGGLISFLIGYLIIYVVLLIMQLFPAGWWQMQIANSELARFMINQTPGIAHLVIDTLVQGG

SEQ ID NO: 7 - protein, 332 aa, Lactobacillus reuteri
  REGION 1..332: note = Description of sequence: Agglutinin receptor precursor-1 (ARP-1) (natural)
MNEYNAEMAKLNQGANAPVITTNSVNQALSLKPENNATVDIEALNPRITFKRVEEGTKYAGYQIFDKNNAYVNNIDGEFLRVTYTNLKNSTYKGSKISKIVVTYSDSTPTGNRITQSGLNAVTEGANDNFLVVFEDPVRGDMHSTTVTATYQYYDANGNLIDFSGTNNAWLSVGSLNFDQGNDYQGGKNEGNPTSGISEGVKLISGAQIKQLAGSSISVHDDGWAYAGFNNYSGTGMNNGINTDNGGSGWDMDGSPNAYYGAIVFQLTGSSVSLRQGLVSWGGADIASQYNNQFLNNAWFTAGTTLPETQIKQPIRKTSETHYHYNPSVIRL

SEQ ID NO: 8 - protein, 2059 aa, Lactobacillus reuteri
  REGION 1..2059: note = Description of sequence: Agglutinin receptor precursor-2 (ARP-2) (natural)
MAQKLMSANSTDKNFKMYKSKKSWVFAYSTTLALAAVAGITLSTTNVHADTTNGGDNQVNATAVTQNTTSNTVDQIAANTAQTDNTSTSINIRSLMDDLASGDDTSSSQNGQEQSQNYASSNQNSQTQQENGTTGQSTASQNGTTSDQTNSDQSDKNYYVISTRDLDKNGNVNYLTQKNYTSIKGQEVADGTVVTWPLSVSALPANRAQDLKSHVISETLDPHLEYLHYRAYLTNTDGTVTDVTNHVNLNRSGQTLIFTDDNYLLSIYNNNRYRVQNLPVIKLVTKANGNGYIIPNAFKSSYVFNDGSHDVSFTTTSNNVQIKTFNPGNSKDVEIGGNVQGDPSGTINGQVVADGSVVTWPMSVGDLPANRAQDVLSHIETDTLYNGLNYEGYHAYLPQADGSFQDVSSHINVQQNGQDLTFIADDYLIGLYNQDKSTAFKMPIIDLITSVHGTSIIAPNKFNSQLAFKDGNGQTVINNTSNQVQISTYHPTNTKDVELGGNVQGDTPNSINDKVVANGAIVTWPMASSELPANRVQDLQSRVISETLDSHLQYQGYKAWLQNADGKYTDVTSHVKLTQDGQNLTFADDEYLLNLYNSNKGTAYKLPIIDLVTKVNGAGITAPNSYTTKYVYSDGDGNTTINVTSNTVKISTFNPTTNKDVELGDNIHGDTESSIAGKLVSEGTIVTWPLSTSDLPANRAQDVVSHTAVDALEPTLQYISYTAWLPDSNGQLQDVTSHVKMTRDGQKLTFTDDDYLIGLYNQNKDIALKMPIIDLVTKATGNTKLLPNSFDSQFVYNDVDGNTIINVSSNKPTVETFDPTVHKDVELGGNNVQGDTPNSIDGKIVAQGTVVTWPMSTSDLPANRTQDVVSHSTSETLNQNLQYVGYHAYMPDANGKLQDVTSHVQLQQNGQNLVFTDDSYLINLYNQDKSIAFKMPIIDLMTKAISDSATIPNTFESQYVFNDGNGNTTFKSTSNTVQIITYKPKTTKDVELGDNIHGDTNASIAGQMITDGTVVTWPMSTSDLPANRTQDLQQHVVTDNLNDNLIFQGYTAWLPTANGLVDVTNHIELTRDGQNLTFTDDAYLLNLYNQNKDTAYKLPIIDLVTKANGNTKLIPNNFDSMFVYNDGDQQTTVNVTSNTVNISTYDPTATKDVELGDDIEGDTADTINNLMVQIGTKMTYPLTVSDLPANRADEITAHQSVDTLSDYLEYQGYKAYLPDADGKLQDITEHVNLKREGQKLSFNDDDYLINLYNNSKATKQALPVIDLVAKVTGSNDGKKVHIIPNHFDSTITTKDGKINTTSNTVVINSNDPEAVKDVELGDNVVGDTPNSVTGTTVADGTIVTWPMSVGSLGANRAQNVIKHTETENLDSGLTYLSFKAYLPDADGKMQDITEHINIQQDGQKLVFTDDDYLISLYNKDKSQRFALPVIDLVTRVNGDNKIIPNTFVSQFTFNDGKGNTITSVTSNQVNVSTFKSNPEKHVTLGTDIEGDDAENADGTVVAQGSEVTWPLSDKSPLPANRSQDVKSHTLVDKLDDNLQYNSYKAYLKGTDGKLQDVTDHIKLTRDGQNLTFIDDDYLLDLYNKDKSTAFNLPIIDLVTTVVGNDKLIPNKFDSNFVFSDGNKDTSMKTTSNEVSISTYTPVTNKDAELGDNVVGDTSDSIANETVPDGTIVTWPLSVSSLPANRSQDVFKHVIEDILDGNLTYNSFKAYLKDAAGNLQEVTDHVKLAQEGQHLTFTDDDYLINLYNSSKNKEQSLPIIDLVTTVHGDSKLIPNEFDNVFVFKDGKGQTTVKTTSNKVTIKTASLPTPTKEETDDQGNNINGNEVKAGEHVNYTLNWDLSNDKDVKATPEMIKKGFFFIDPIDSRALSVDDLSKAKVVDQNGNKVDGISFHLYNSLSEVPEFIQEQVKANNLQDKITGPFVVAQADDLQAFFDKYVKTGAKLKVTIPTIVKSGFTGEFSNTAYQFGFGKATPTNTVTNYVKPMHKPASPETPAAIAPQVISATAQPMTSDAPVTPSEKTAKLPQTGNADEGALLGLAAVSLVGSLGLAALGLKQNRNDD

SEQ ID NO: 9 - DNA, 300 bp, Lactobacillus reuteri
  misc_feature 1..300: note = Description of sequence: Xylulose-5-phosphate phosphoketolase promoter (natural)
  source 1..300: mol_type = genomic DNA
ttaaagtattaaaatagatgtaaaatttatttttttcaaaagaaattttaattgtacactgttggtattgaacggggttaaacaaaggtaaattagcatttctgcggattaagataaatagaaaaatgttaaagaacaccttaaaaagattaattttttataattggaccgtatcaatttgtaaaaaggttgactttttgaaaaaaaagtttatcattaacattgtaaatttaatgatttacgttatgttgttatagagcacaggacgtattgatttatatagaaggagtgtttattaga

SEQ ID NO: 10 - DNA, 300 bp, Lactobacillus reuteri
  misc_feature 1..300: note = Description of sequence: Elongation factor TU promoter (natural)
  source 1..300: mol_type = genomic DNA
atgaatggacagatgttttaatcgctagaatagaaggaaagaaagtcgcaacaaatacggtttctagtacgtggcaggaacgactaggtaagcagattgacgaattaatagaaaaacattagtcaaatacatttacaaatgaacagatagttgatattatatttaagaattcttcttcagagcctaagattaaagctttcaattggcgaaaagaagttgtacaatatgtataaaggtatgtcagtcaccgaatcagatgatctggcattatacttgtaaattatcaggaggttttcatta

SEQ ID NO: 11 - DNA, 300 bp, Lactobacillus reuteri
  misc_feature 1..300: note = Description of sequence: Glyceraldehyde-3-phosphate dehydrogenase promoter (natural)
  source 1..300: mol_type = genomic DNA
atctcacgtgcgatccattacactaagggcgcgtcaacaaatattatactatcttaaataagaatgaattgcaagcattatttgaaaattttaattaaaataacgcttacatcagaaaaatgttgtgattgaatagacaatttttttgaagatggtatcataagtatcgtaggagttgtattattgcttagaccttaccactgcgtcacttacaatggttgagagttgcgatgctgatgtaatgtgataaactaagcaagtacactaattatgttttttcctaaaggaggaatttgcagt

SEQ ID NO: 12 - DNA, 300 bp, Lactobacillus reuteri
  misc_feature 1..300: note = Description of sequence: Glucose-6-phosphate dehydrogenase promoter (natural)
  source 1..300: mol_type = genomic DNA
ttgtttaagatatctttcaaagctgcggaatttttcccagcttttttagttagttttgttttcataagctataattttaaccgattccaaatttcttttaaaagtttttttgatctagaccattaattgataaacgcttaccaaagactaatcaacaagccatttagcggtagtggtccattttaactttctaagacatcttctcagaaaacgtttcctttgatagtgcagattgtgctttaagagtatataattgtcacggtataagaattttctgaaatttcagaaggagtgaacatt

SEQ ID NO: 13 - DNA, 449 bp, Lactobacillus reuteri
  misc_feature 1..449: note = Description of sequence: L-lactate dehydrogenase promoter (natural)
  source 1..449: mol_type = genomic DNA
ctcctctattattattcctgatcaattttaaattaatctccctagataggtatattttagcacaggtcaccaacgttccaaagtttaatctatgtttaaactttaattttcaaaaaaatgctatactatgttcacgatactttaaggaaaggtgattacaatagtgagtctcttaattgctattcttatctgctggttgctatggaagattgggggtttaacggttaagttcattggtctaatccttcttattctattaatcgggacattaattcatgttttactttggccagcgatccttttagcagttattatcttaggagcaggtttattcactaactaatttatctataaaatcttatagtaatttttctgcggaatgttataatcattactgtgagagaaatctcaaataatgtatacataagatgaaagggagactgtttatt

SEQ ID NO: 14 - DNA, 250 bp, Lactobacillus reuteri
  misc_feature 1..250: note = Description of sequence: tuf promoter (natural)
  source 1..250: mol_type = genomic DNA
acaaatacggtttctagtacgtggcaggaacgactaggtaagcagattgacgaattaatagaaaaacattagtcaaatacatttacaaatgaacagatagttgatattatatttaagaattcttcttcagagcctaagattaaagctttcaattggcgaaaagaagttgtacaatatgtataaaggtatgtcagtcaccgaatcagatgatctggcattatacttgtaaattatcaggaggttttcatta

SEQ ID NO: 15 - protein, 3017 aa, Lactobacillus reuteri
  REGION 1..3017: note = Description of sequence: C protein alpha-antigen precursor (natural)
MVSKNNHQFYQQKHAERKQRWGIRKLSVGVASVLLGTTFMLYGNHAVLADTVTSPSDDVTRSTTTQGGNKDKVTEGTTEGTTSTPQTSGDSTDKQANGQNVNQQVPTTDTEEATNHQDTPQGQDTTQNTTNVDKKDTEVTPANDATTPTTQKITAKFTTAKFTTAKFTAAKFKVLAARPVMKVAGTASLPISNQDIKLDSQPMLTEIINKPTDNWVYNNLKWYQDTSTEKIKEILQNHTANDESGRYYFAGVANYNEHYHAIYLLARSNNLNDNSLYVTILHTGLGKNIQEAVVAPGESKKVEYSGTTHTPIFTNYDGTSASIDLDGIEKGDNIYGMVVGFAYGHNTGIKGDPASMGNGFVMTPIPTKMTTTIHYIDQATGDEIAVPKSFEGVAYQKYTITGEAPTIDGYTLKKSPETTGYISPYKVGESYDFRLDKHVVIKQTVIDAQGLVRVTAYYDGEVLNNTTRYLGNKLNVNDRMSFISHGKWYTYINQITSTNDGIVYYYAKDGSEDKSEVRVHYIDVTGSKNSIFVPGDGEEVATDKISGKLGENYNYDVNLPTDYNLATNQANTVNGTYTIDHHDEYVYVVKKTSAELDPTVPAKTKVDNPTSLTADEKKTIEDKIVEANKDKFPEGTGVTVANDGKATITYPDKSVDTIEGNQLVEEKTSAEKLDPTVPAKTKVDNPTSLTADEKKTIEDKIVEANKDKFPEGTGVTVANDGKATITYPDKSVDTIEGNQLVEEKTSAEKLDPTVPAKTKVDNPTSLTADEKKTIEDKIVEANKDKFPEGTGVTVANDGKATITYPDKSVDTIEGNQLVEEKTSAEKLDPTVPAKTKVDNPTSLTADEKKTIEDKIVEANKDKFPEGTGVTVANDGKATITYPDKSVDTIEGNQLVEEKTSAEKLDPTVPAKTKVDNPTSLTADEKKTIEDKIVEANKDKFPEGTGVTVANDGKATITYPDKSVDTIEGNQLVEEKTSAEKLDPTVPAKTKVDNPTSLTADEKKTIEDKIVEANKDKFPEGTGVTVANDGKATITYPDKSVDTIEGNQLVEEKTSAEKLDPTVPAKTKVDNPTSLTADEKKTIEDKIVEANKDKFPEGTGVTVANDGKATITYPDKSVDTIEGNQLVEEKTSAEKLDPTVPAKTKVDNPTSLTADEKKTIEDKIVEANKDKFPEGTGVTVANDGKATITYPDKSVDTIEGNQLVEEKTSAEKLDPTVPAKTKVDNPTSLTADEKKTIEDKIVEANKDKFPEGTGVTVANDGKATITYPDKSVDTIEGNQLVEEKTSAEKLDPTVPAKTKVDNPTSLTADEKKTIEDKIVEANKDKFPEGTGVTVANDGKATITYPDKSVDTIEGNQLVEEKTSAEKLDPTVPAKTKVDNPTSLTADEKKTIEDKIVEANKDKFPEGTGVTVANDGKATITYPDKSVDTIEGNQLVEEKTSAEKLDPTVPAKTKVDNPTSLTADEKKTIEDKIVEANKDKFPEGTGVTVANDGKATITYPDKSVDTIEGNQLVEEKTSAEKLDPTVPAKTKVDNPTSLTADEKKTIEDKIVEANKDKFPEGTGVTVANDGKATITYPDKSVDTIEGNQLVEEKTSAEKLDPTVPAKTKVDNPTSLTADEKKTIEDKIVEANKDKFPEGTGVTVANDGKATITYPDKSVDTIEGNQLVEEKTSAEKLDPTVPAKTKVDNPTSLTADEKKTIEDKIVEANKDKFPEGTGVTVANDGKATITYPDKSVDTIEGNQLVEEKTSAEKLDPTVPAKTKVDNPTSLTADEKKTIEDKIVEANKDKFPEGTGVTVANDGKATITYPDKSVDTIEGNQLVEEKTSAEKLDPTVPAKTKVDNPTSLTADEKKTIEDKIVEANKDKFPEGTGVTVANDGKATITYPDKSVDTIEGNQLVEEKTSAEKLDPTVPAKTKVDNPTSLTADEKKTIEDKIVEANKDKFPEGTGVTVANDGKATITYPDKSVDTIEGNQLVEEKTSAEKLDPTVPAKTKVDNPTSLTADEKKTIEDKIVEANKDKFPEGTGVTVANDGKATITYPDKSVDTIEGNQLVEEKTSAEKLDPTVPAKTKVDNPTSLTADEKKTIEDKIVEANKDKFPEGTGVTVANDGKATITYPDKSVDTIEGNQLVEEKTSAEKLDPTVPAKTKVDNPTSLTADEKKTIEDKIVEANKDKFPEGTGVTVANDGKATITYPDKSVDTIEGNQLVEEKTSAEKLDPTVPAKTKVDDPTKLTNDEKKEVEDNIRDHNTGLPEGTKIAVGDNGDTTITYPDKSVDTIEGNQLVEEKTSAEKLDPTVPAKTKVDDPTKLTNDEKKEVEDNIRDHNTGLPEGTKIAVGDNGDTTITYPDNSVDTIPGDKVVEGKSDAAKNEPKVPGDKVKVDDPNKLTEDEKSEVVKAVEDANKDENGKSTLPEGSKVTVGDNGDVTVTYPDGSKDTIPGDKVVEGKGTEGQTDADKNEPKVPGDKVKVDDPNKLTEDEKSEVVKAVEDANKDENGKSTLPEGSKVTVGDNGDVTVTYPDGSKDTIPGDKVVEGKGTEGQTDADKNEPKVPGDKVKVDDPNKLTEDEKSEVVKAVEDANKDENGKSTLPEGSKVTVGDNGDVTVTYPDGSKDTIPGDKVVEGRGTEGQTDADKNEPKVPGDKVKVDDPTKLTEDEKSDVEQAIKDANKDENGKSTLPEGSKVTVGDNDDVTVTYPDGSKDTIPGDKVVEGKGTEGQTDADKNEPKVPGDKVKVDDPNKLMEDEKSDVEQAIKDANKDENGKSTLPEGSKVTVSDNGDVTITYPDGSKDTIPGDQVIEGKSDADKNTPNVPGGDKVKVDDPTKLTDNEKNAVKDKVDEANSNLPDGTKVTVGDDGTTTITYPDGSTNTISGHDLVTGKTDADKYPLNPGQAVNVVDPNHLTQAEQDQVKEAIQTTNPTAPIATITVDTAGNVQVTFADGSTTTLQANLHKHVTEATTGSAIKPGVGTNGGQTKGATSTNQTATKQQAQQHLPQTGDQPATWAMLSGLGVAFLGLLGLKKKRED

SEQ ID NO: 16 - protein, 1472 aa, Lactobacillus reuteri
  REGION 1..1472: note = Description of sequence: "Arabinogalactan endo-1 4-beta-galactosidase (natural)"
MEIKKHFKLYKDGKKWCCAAIATTVLGIGLAIGSPSVLADADTITSTSDANNSLVKNDNTSDTDSNSESTFTDTNKNSTNEKEINENKNIDSSQQINQEQTKSNNSEEQTTPVNVKAENTDIKDSIPEKSTPNSFKEINGSTYYYGENGDLYRNQFYNNWGRTYYFQANGARLDNGFYNNWGRTYYFGSDGARWDNRFYNNWGRTYYFQNDGSRLDNSFYNNWGRTYYFGVDGARWDNRYMVKWGRAYYFGNDGALLQNQLKSINGINYWINNEGIIPLKNQFLTANENQLFYFDGNGSLVVNKFYHNWGHTYYFGSDGARYTDQFLNRDGKVYYFDNQGIMYQDQYYKNWGHTYYFGSDGARYTDQFLNRDGKVYYFDNQGIMYQDQYYKNWGHTYYFGSDGARYTDQFLNRDGKVYYFDNQGIMYQDQYYKNWGHTYYFGSDGARYTDQFLNRDGKVYYFDNQGIMVTNQVRVIDGKGYEFNDNGEATETSDMGQTRDTVAKEVAQALTNQGIKGVKYDWRNTNNDYQELALHDIAQEVAQGDTNPDKNVIEKKLQANNLLSGKVLVVYSTDFTNDDPQKITNTFMNSYDFTNADNSVLGVGADLNKNKLVIILFKPGEKAEQPQATSTISASISDIFKKAGVNVDVDNGLTKGSVVNSADLGNALTNGTAELLKGDKGTIISQEVLKAIFAAFAGNTSAVEGTKNYYNGNDAYHYEFWLEGQSADDKLNNFLALNKGAKYGDQLKVNYTATLVFGQETGTNSNESKVPASERTDEQLDLAYKTGTDTGLRYDSVKVEKIPGMTDDMVRGVDVSSYQALINAGVKFYDFNGQESNLFKILKDSGVNWVRLRVWNDPYNAQGQPYAGGDNNEENLIKMAKEASDNGLKLLIDFQYSDFWTDPAQQILPKAWRNLSHGEMSQEVYLYTSKILNDLQKAGASVKMVQIGNEITNGAFGLYTGRNGGGNWASLWETSDGDQVAKYIQAGSSAVRRIDPTIKVAIQLETPEINKYRGIMNVLKKNNVDYDYLGTSYYPFWSTTQGNGWYDNVDLGYGANTPVNLEAIEKMAWNEFGKRTVILESGWLNNTNDADGTHNSVGENNETTNIDRYSADPQGQVDEIEDMYNAIIAQKGLGAFYWEPAWIPVKAGWNNWQYNKLMSNIYGSGWASQYAKGYAPDSVLYYDGKEAWGGSSWDNISLFDDHGHPLQSLNVYNGMLNGYESPKNVKSSLSTQLVKIWNETDVIPNDGLTEGTKLSTDLFGTTQLSGNDGQSIGNAELTKLAGRLKDGISSKVYTAANGARYHYIYWLEGGNNKVNTFVSANKDAKYGQPLIANYSATVVVDSEPGTQVATSPLQIKISQVWNTVNNEEIKIDNPLKQGDLITDKSDNAFSGILNSKDIKEALTGEKGKDVSESTVNDVKSLLPKEVKGSKTYTTADGNQYYYDFWLASVETSNVNYGEPIIVNYTASLKWLG

SEQ ID NO: 17 - protein, 1063 aa, Lactobacillus reuteri
  REGION 1..1063: note = Description of sequence: Chromosome segregation protein (natural)
MEKTMKKKALVATTAVAGITLVGEVTTVHAADNVQQPVNEQNVNQSSQEEKQAAQNLQNAQSDVNTATEANSNAQDNLASANNNLSNAKKAVSDQAAKVADATKAQSDASTKVDNDNKVVADAQQKADQATPANIENAKQAIEGQNKVIDQDNENIKYSNTDQDKAQNTLNNAQSNEDKANATLSNKKSSQASAQNNVKQAEDALNGTHLVEAQNAFNQAQSNVENAQSKYDQANNQLSDAQKKVTTNQNDLTAKNKALDNINNQVDTDQNNVNSNQATADSASSATQVAQNAVDQTKQSLDKVIEELNGFSENTIKVPAGAQEAYEAFIDAVDNNADQSQLDSLAKKMYDTLHQGQGTNGINHFNSSKYDQNQLVDVDHLTTDQLNELTQFAADMINSARKAWGSDKNAGTLIPTQGVSEMAQQIAKGYVSDNWHISQGHDVKRVTAAAGLIGLNDAGQFYEDASEGYVHAWPWEKDSYTMDNLKEAVYDSILGMLFADDNSGNGHMTDLLGLHVNRKEDHQYFGLSTNMCPGSYMGQLHFIIVENDPAYIKDPQTFNAKGGTTKIEYIDPKVQLNQQKDILTTTLSTQQADLATKQDALNKANQNLANAKKQLSEDQDLQTVAQQNRDSAQKALNDATAKVSNLQATVNSLSQDLNSAKATLDQAKKTLESYTADHKAKLDNYNNAKAALDDANKAVAEAQSAVDTAVNETKIAQNNLDQKKQAVTDAQNKLANDQEYLATLKQNLADLQNAPQNLQKAKDQLAKDQIALDNANKDLQNQKDSLDELNKKLEDAQVKVNEAQSAANVTKATLDQAQAKLSDAEATWKELHNDAHRYGNVVKVTPITMEAGTSLPDPVIENGFTVNTGTNQLFVSLAAIDSSNNNIPQGTKASWANRSKALTDSQNAGSYSEDILITFPDNSTVTVPVDLTVTAKKITEDQKATEGGYHIVNGSVVDKQNNLVSGWTVKNGQMVDPEGNVIKTTMSTAQGVTIEKNNSKSGNTKTNMIQTSLTIANNKATTNKDNQLPQTGNYNNNTKVLGLAGIALASALTMFGYKKRQHN

SEQ ID NO: 18 - protein, 212 aa, Lactobacillus reuteri
  REGION 1..212: note = Description of sequence: D-gamma-glutamyl-meso-diaminopimelic acid endopeptidase Cwls (natural)
MKSTTKKILASSLGVAGAMAMGTVTAKADTTVTVNAGDSLNGIAQKYNVSADDIATANHLQNKELIFVGQKLTIPTKDKNETPANNAEKKDQASKNSQSLQDSVNKAMSYLGTPYVWGGNKPGGFDCSGLVQYCYGIPQRTTYEQQALGPHIHDNVLNAPYGALVFYGSDDAPYHVAISLGDGRIIQAPNENETVKITDQQYFPGNYYVVMH

SEQ ID NO: 19 - DNA, 1107 bp, Lactobacillus reuteri
  misc_feature 1..1107: note = Description of sequence: N-acetylmuramoyl-L-alanine amidase sle1 precursor (natural)
  source 1..1107: mol_type = genomic DNA
atgcgtaatcaattcatcgatgtttcaagttatcaaccagatactgttgcctttttccaagctgctaaagctcagggtgcattaggggtcgttgttaagttaacggaagggtccgaagatggttcggcttatgttaatccacgtgcggccgctcaaattcgtaatgccttagcggttggcttgcgcgtttcctgttaccactttgctcgttatacatcagtgactgatgcacaaaatgaagctcgattcttcgttaaaatcgctaagcaatttggtatgtatgacgatactttgatgattgatgatgcggaagttcattcaactgcagattatcaatcagtatccttagcctttcttcaagaagtagaagctcttggttacaagaatactgggatttactccatgaagtccttcttcactggcggtattcttaattcacatggctttgattcccggaagatttggattgctggctatggtgtgactgaactggggattgataatgcaagtgcttggcaatattctgatcatagcatcatgggaattgatactagttatgactttgacggtgcctttacgactggtttagtatcaggcaatgttccgcaagctgttattccagcaccacagccggttcaacatattggtcacccagctactggaacctacattgttcagccgggcgatacattgagtggaattgcagaaaaatacgggactacttatcagaacctagcagcaatcaatggtattggtaatccaaaccagatcaatgtcggccaagtcctcaaagtcaccggaaaagtatcaaacgaaaatacttactttgttcaatcaggcgatacgttatccggaattgccaccaaattcggcaccactgtctcagacctcgtaagccgtaatcacattactaacccgaatgtgatctacgttgggcaaaaactctacttagccggcaacggacaatccaatgcttatactgtccaagcaggggacacactaagcggaattgcggctaagtttggcaagacctggcaagcattagctcaaaagaatggcatcgcaaatcctaatatgattttcattggtcaaacaattcagatttaa

SEQ ID NO: 20 - DNA, 2439 bp, Lactobacillus reuteri
  misc_feature 1..2439: note = Description of sequence: Peptidase family M23 (natural)
  source 1..2439: mol_type = genomic DNA
gtgtaccgaattattggttataatgaaccaacagataaagcaggatttattgtactggatccccgagttaatcgtcatattagttcgggaaaactcacgcttaaagaatctaatattgatgatttgactattacggttaatcaagcaagtccattatgggacaacgtaaggccttatcatactcatgttaacgtttatgatgataatgaacttatttttcgtggacgagctatcaaacctaaaaagtcgatggaagaaagcggacaattcattcgtgaatatgtttttgaagatattgaagcatatctcatggatagcacccaaagattttatgaaggtgttggtcaaacgcccaaagaatttttacaaactttaatcgatgttcataattcacaggttcctgactataaaaagtttcaagtccggaatgtaaatgtcactaataataaggatgaccaatatcgacaaattgattatcccaaaactagcgatgctattaatgataaattagttaaatctcttggtggttatattgtgactacttacaacgctaacggaataaactacattgactacttaacggatattggggttgatcataaagatgatactcctattcagttagctaaaaatatgaagtctgcaagtatgcaaattgatcctactaaggtgattacaagactgattccactgggaaagacactagaaccatcaaaagttgatgtaagtgatgatgatggagagggcggttctggatcattagatagccctgaagaattttgtaaatcagaaattaatgctacttggggtagtgatattaataatatgaaacaagattttgccgctcgttcttcgagagttcgggcttggggagtggacgttaatcgtttatatgatgtggtgaaaaatgctggagtaagtcctgaatggttctttgcttatgaacttcaagaacaaggaacttactatggatggcttaaccatacttatcgacacggtgatgcgtatagtgatgcgcaatctgtttgtgagtggattaaaaattgttcaaatagtaattccattaatccagcatggagcgcaccggaaggatcaatggcgccgaatcaagcattagcggataaatggaatcaagagtttggaaaaggtactattggccgcgtttatttacaagggactgccgctgctgtttgggatttagctggtcaaacgcctaatccagctattggaaagccaattagtggatgcatttcttgtattaaacgttggggtggtcattctaatgcagctggtggtacatggggatggccttttcctgatgttggggaaggtcatttttctcaagttcagagtttcggaaatgatggcggatatcgtcaaaatagttatcacgatggtgtggattttggatcaatagatcatcctggtagagaagtgcattgtattcatggtggaacggtaactatcaaatcagctatgggtggcttaggtaattttgtggttattcatacgccggaaggattcaatatcgtttatcaagaagcttttagttctccctctaatattattgttagtgttgggcaaaaagtaaaaactggtgatgtaattggatatcgtgatacagaccatgttcatattggcgtaactaagcaagatttttatcaagcagttcgaaattctttttctcctgcaggtggttggctagatccagtaaaactaattaaagaaggtggcgatgggtctaaaccacaagaaggaaagaaagatcaaactgttgataatagtaatgctgcacgtcctaaattaaccattactactgtcaataacggtagagactatattgatattcctgatttacaaaaagaattcggtattattgagggaactgttgaatttgataatgtagatgatccgaatgttttaatgcaacaagctcaaacatggataaaggctcaaagaatacctcaaagttgggaagttacagctttagaattacatatgacaaacttcaaatcttttaaggttgctgataggtacatgtttattaatccaaatgttgcaaaaccccaattattacgaattactcaaaaagaaattgatttactaaagccccatgcgtcttcattaacgattggtgataagacgatggggcttactgattatcagttagaaaatcaagtcaattttcaacaatttaaggaaattcgagtgatggttaatcaggttgtccaaacccaagagcaatctgctaataacaataataaggttatgcaaaattttgctagtagtgctgatcttgcacaaatgagacaggatctaagaaatcttcaagatgataacgatcgtgctcgcaaaggaatggtttccttagaagaattcaataaactaaaggaacaagtagaaaaactaacaacaggaggcgatgataatggcaagtga

SEQ ID NO: 21 - protein, 739 aa, Lactobacillus reuteri
  REGION 1..739: note = Description of sequence: Chromosome Partition Protein Smc (natural)
MNKANQKVADDTTAVNNKQTDVNNAAEAKKNADEALKNANDAQTSAQKNKDAKQAIADEASVALADANTAVKDAQAKVDAINDKLANFNTITLPAGYKDDLIAYYNYFGNSNYNQDEANNLAQDLLKYRDQAMSQNKFKDNLSDDRVVDIDNLNSTDRAELSQFVASLINQVRTQMGTNLVISSPAADDYAEQVSQNYNKDNWNSADNGKHDQSALNNATDQLNISWNGENMGLDQSIFTTDYTVLTDGTKLPTGNKQTINDLKHLIYDDFISMMFDDADSAWGHATNFAGIDNFAAEKQAVGFSLDKFYNTHYDLVEANQKVEENSYTLPSINALTQKLADAKDDLSIKQTDQASKQKANDDAQNALSSANQVLVAAQNDVKDKTATAQEANDNLTTAQNDLATLQNQLSADQANQKQAQTTFDSFDADLATKQANLQKATDSLKAEQGRLAIAQADLDNANKALSDANNNLAQKKQVVENDNETLKVDNDKLVQLQNNLSDLQNAPKLLAAAKEQVATAQKALADAQEAYNVANDKLTSLKQTAAGTTTNVSKAQQALAEAKNNEDAAKEVLDQAQQALTELRQKEALAKQVAEEQAKLAAEKEAKDNGYHIENNQVVDAKGNSVNGWTVKGNQIVSPTNATVDPAVSVTTNVNVDSKGQVQPQTSVTANSVKTVAATESANPVATTTVQTREQYKQQLKSNNQLPQTGNNDSAVLSLAGVALAAMLSLFGIKKREY

SEQ ID NO: 22 - DNA, 185 bp, Lactobacillus reuteri
  misc_feature 1..185: note = Description of sequence: Cwls endopeptidase promoter (natural)
  source 1..185: mol_type = genomic DNA
aaattaaaaggctggattttttcggcctttttttagtgcaaataattattttttacgtatttatattatagggctaatcactaaactaataattagtggttgaagcgctgaaaattttctgctattttattaatagtttgataataaaataatgatatttaatataaagagggataaacgaaata

SEQ ID NO: 23 - DNA, 275 bp, Lactobacillus reuteri
  misc_feature 1..275: note = Description of sequence: chromosome segregation protein promoter (natural)
  source 1..275: mol_type = genomic DNA
gaagtacaaagttactttaactataatgaaaaacaagacaatataaagaaaacaacatataaggttcagttcataactgattagatttataataaatattgtaaatcggacaaaaataaattaattttcaattaattcaaaaaaaccatatttttttcgttttggcatatttggatttgctacactaaagatgatcaagaaaggggaaaagataatcttcaatcttgtgtacttagtttgttaattaatttataaatttagggaggaaacctatc

SEQ ID NO: 24 - DNA, 313 bp, Lactobacillus reuteri
  misc_feature 1..313: note = Description of sequence: Chromosome Partition Protein Smc promoter (natural)
  source 1..313: mol_type = genomic DNA
gcaatgcacaagatgctgaaacaaaggcacaacaaaatgcagatcaagcttcaccagctaatattcaaaaggcacaagatgctattgctaatcaagaaactcaaattagtaaagacaccgatgctattaatgacgctaacaaagccgttagcgatgcacaaagcacagttgatgcagcgcaaaaaaagttaatgatgcaactactgctcgtgacaatcaacaaaagaatgttgatactgctagtgatgcagttaagaatgctcaagctattcttgacaacagtgatcaggctaaaaaggaagcccaagatgct

SEQ ID NO: 25 - DNA, 527 bp, Lactobacillus reuteri
  misc_feature 1..527: note = Description of sequence: Lactobacillus reuteri 3630 F1 16S
  source 1..527: mol_type = genomic DNA
gccgcgggtgcctatacatgcagtcgtacgcactggcccaactgattgatggtgcttgcacctgattgacgatggatcaccagtgagtggcggacgggtgagtaacacgtaggtaacctgccccggagcgggggataacatttggaaacagatgctaataccgcataacaacaaaagccacatggcttttgtttgaaagatggctttggctatcactctgggatggacctgcggtgcattagctagttggtaaggtaacggcttaccaaggcgatgatgcatagccgagttgagagactgatcggccacaatggaactgagacacggtccatactcctacgggaggcagcagtagggaatcttccacaatgggcgcaagcctgatggagcaacaccgcgtgagtgaagaagggtttcggctcgtaaagctctgttgttggagaagaacgtgcgtgagagtaactgttcacgcagtgacggtatccaaccagaaagtcacggctaactacgccccccaccagccccaa

SEQ ID NO: 26 - DNA, 531 bp, Lactobacillus reuteri
  misc_feature 1..531: note = Description of sequence: Lactobacillus reuteri 3632 F1 16S
  source 1..531: mol_type = genomic DNA
tgctggggtttgcctatacatgcagtcgtacgcactggcccaactgattgatggtgcttgcacctgattgacgatggatcaccagtgagtggcggacgggtgagtaacacgtaggtaacctgccccggagcgggggataacatttggaaacagatgctaataccgcataacaacaaaagccacatggcttttgtttgaaagatggctttggctatcactctgggatggacctgcggtgcattagctagttggtaaggtaacggcttaccaaggcgatgatgcatagccgagttgagagactgatcggccacaatggaactgagacacggtccatactcctacgggaggcagcagtagggaatcttccacaatgggcgcaagcctgatggagcaacaccgcgtgagtgaagaagggtttcggctcgtaaagctctgttgttggagaagaacgtgcgtgagagtaactgttcacgcagtgacggtatccaaccagaaagtcacgactaactacgccccacaccccagccgcaa

SEQ ID NO: 27 - DNA, 165 bp, Lactobacillus reuteri
  misc_feature 1..165: note = Description of sequence: Lactobacillus reuteri 3630_00184
  source 1..165: mol_type = genomic DNA
atggatatgaaaataaaaaaagaaccaccacaacaagtaaaattagttgaagtaattcaggttataacctctcgtggagctggaacaaaggaggatccgataagaaagattattcagtattggagcaaagaaggcacattattagcagaaagttttggaaactaa

SEQ ID NO: 28 - DNA, 129 bp, Lactobacillus reuteri
  misc_feature 1..129: note = Description of sequence: Lactobacillus reuteri 3630_00491
  source 1..129: mol_type = genomic DNA
atggctggtatcaaaagtatcgcaaaagcggtaatgacccagaatcacttcgtgatcgccgaggcaaagctaagccagaagagaagtggacggaagttgaccgactcaaggcagaaaatcgcttattaa

SEQ ID NO: 29 - DNA, 117 bp, Lactobacillus reuteri
  misc_feature 1..117: note = Description of sequence: Lactobacillus reuteri 3630_00497
  source 1..117: mol_type = genomic DNA
atggctaaatacactgttgaattaagtgaagaagatatccaaatgatcaaggattgtcattcaaagaatccttctatcatgaaggcaatgaacgacgctaaaaaagttgaagattaa

SEQ ID NO: 30 - DNA, 6789 bp, Lactobacillus reuteri
  misc_feature 1..6789: note = Description of sequence: Lactobacillus reuteri 3630_00533
  source 1..6789: mol_type = genomic DNA
gtggatgcggattcgctggcactcgttgatgcactttcacttgcgctcgttgatgccgattcactggcactcgttgatgcactttcgctagcactagtagaagctgactcacttgcacttgtcgatgccgattcgcttgcacttgtcgatgctgattcgcttgcgctcgttgaggctgattcgctagcactagtagaagctgattcactggcactcgttgaggcactttcacttgcgcttgttgaagccgactcacttgcgctcgttgatgcactttcgctggcacttgtcgatgccgattcacttacgctcgttgaggccgattcgctgacactcgttgatgcactttcacttacgctcgttgaggccgattcgctgacactcgttgatgcactttcacttacgctcgttgaggccgattcgctgacactcgttgatgcactttcgctggcacttgtcgaggcactttcacttacgctcgttgaggccgattcacttacgctcgttgaggccgattcacttgcgcttgtggatgcggactcacttgcactcgttgaggcactttcacttgcacttgtcgatgcagattcgctggcactcgttgatgcactttcacttgcactcgttgatgcactttcacttgcacttgtcgatgcggattcacttgcacttgttgaagcggattcgctagcacttgtcgatgcggattcacttgcgcttgttgaagcggattcgctggcgcttgttgaagccgactcacttgcactcgttgaggctgattcacttgcactcgttgaggcactttcgctggcgctcgttgatgcagattcgctggcactcgttgaggccgattcgctggcgcttgttgaggccgattcgcttgcacttgtcgatgctgattcacttgcactggttgaagcagattcgctggcactcgttgaggcactttcgctggcactcgttgaggccgattcacttgcgcttgttgaagctgattcacttgcacttgtcgatgctgattcacttgcgctagtagatgccgattcgctggcactcgttgaagcagattcacttgcgcttgttgaagccgattcacttgcgcttgttgaagccgactcacttgcactcgttgaggcactttcgctggcgctcgttgaagcagattcgctggcactcgttgaagcagattcgctggcgcttgttgaggccgattcgcttgcacttgtcgatgctgattcacttgcactggttgaagcagattcgctggcactcgttgaggcactttcgctggcactcgttgaggccgattcacttgcgcttgttgaagctgattcacttgcacttgtcgatgctgattcacttgcgctagtagatgccgattcgctggcactagtagaagcagattcacttgcgcttgttgaagccgattcacttgcgcttgttgaagccgactcacttgcactcgttgatgccgattcacttgcacttgtggatgcggactcacttgcactcgttgatgcactttcacttgcacttgtggatgcggattcgctggcactcgttgatgcactttcacttgcgctcgttgatgccgattcactggcactcgttgatgcactttcgctagcactagtagaagctgactcacttgcacttgtcgatgccgattcgcttgcacttgtcgatgctgattcgcttgcgctcgttgaggctgattcgctagcactagtagaagctgattcactggcactcgttgaggcactttcacttgcgcttgttgaagccgactcacttgcgctcgttgatgccgattcactggcactcgttgaggcactttcacttgcgcttgttgaagccgactcacttgcgctcgttgatgcactttcgctggcacttgtcgatgccgattcacttgcgcttgtggatgcggactcacttgcactcgttgaagccgattggcttgcactagtagaagctgattcactggcgctcgttgaggctgattcgctggcgctcgttgaggctgattcactggcactcgttgaggccgattcgctggcgctcgttgatgcagattcgctggcactagtagaagctgattcactggcgctcgttgatgccgattcacttgcacttgtcgatgcggactcacttgcactcgttgatgcactttcgcttgcacttgtggatgcggattcgctggcactcgttgatgcactttcgctagcacttgtcgatgccgattcacttgcactcgttgatgcactttcgctagcactcgttgatgcactttcacttgcacttgtggatgcggattcgctggcacttgttgatgcggactcacttgcacttgttgaagccgattcactggcgctcgttgatgccgattcacttgcacttgtcgatgccgattcactggcgcttgttgatgcggactcacttgcactcgttgatgcactttcacttgcacttgtggatgcggattcgctggcactagtagaagctgactcacttgcacttgtcgatgccgattcactggcactcgttgaagcactttcacttgcgcttgttgatgcggactcacttgcactcgttgaagccgattcgctagcacttgtcgaagctgattcactggcgctcgttgatgctgattcactggcgcttgttgaagccgactcacttgcgctcgttgatgcactttcacttgcgctcgttgatgccgattcactagcactagtagaagctgattcactggcgcttgttgatgcagattcgctggcacttgtcgatgccgattcgctagcactagtagaagctgattcactggcgcttgttgatgcagattcgctggcacttgtcgatgccgattcgctagcactagtagaagctgattcacttgcacttgtcgatgccgattcactggcgctcgttgatgccgattcgctggcactagtagaagctgactcacttgcacttgtcgatgccgattcactggcactcgttgatgcactttcgctagcacttgtagatgcggattcacttgcactcgttgatgcactttcactggcactcgttgatgcactttcgctagcactcgttgaagcactttcacttgcgcttgttgatgcggattcgctggcactcgttgatgcactttcacttgcgctcgttgatgccgattcacttgcgcttgtggatgcggactcacttgcactcgttgatgcactttcgcttgcacttgtggatgcggattcgctggcactagtagaagcagattcacttgcgctcgttgatgccgattcacttgcgcttgtggatgcggactcacttgcactcgttgatgcactttcacttgcacttgtggatgcggattcgctggcactagtagaagctgactcacttgcactcgttgaagcactttcacttgcgcttgtggatgcggactcacttgcacttgtcgatgctgattcgctagcactagtagaagctgattcacttgcactcgttgatgcactttcacttgcgcttgttgaagccgactcacttgcgctcgttgatgccgattcacttgcactcgttgaggcactttcacttgcgcttgttgaagccgactcacttgcgctcgttgatgcactttcgctggcacttgtcgatgccgattcgctggcactagtagatgcggactcacttgcgctcgttgaagccgattggcttgcactagtagaagctgattcactggcgctcgttgaggctgattcactggtactcgttgatgcactttcgctagcactcgttgaagcactttcacttgcgcttgtggatgcggactcacttgcactagtagaagcagattcacttgcgctcgttgatgccgattcacttgcacttgtcgatgccgattcacttgcgcttgtggatgcggactcacttgcactcgttgatgcactttcgcttgcacttgtggatgcggattcgctggcactagtagaagcagattcactggcgctcgttgatgccgattcacttgcacttgtcgatgccgattcacttgcactcgttgatgcactttcactggcactcgttgatgcactttcgctagcactcgttgaagcactttcacttgcgcttgttgatgcggactcacttgcacttgttgaagccgattcactggcgctcgttgatgcactttcacttgtgcttgttgaagccgactcacttgcgctcgttgatgcactttcacttgcgctcgttgatgccgattcactagcactagtagaagctgattcactggcgcttgttgatgccgattcgctggcacttgtcgatgccgattcgctagcactagtagaagctgattcactggcacttgtcgatgccgattcactggcgctcgttgatgccgattcgctggcactagtagaagctgactcacttgcacttgtcgatgccgattcactggcactcgttgatgcactttcgctagcactcgttgatgcactttcgctagcactcgttgatgcactttcacttgcgctcgttgatgcagattcgctagcactagtagaagctgactcacttgcacttgtcgatgccgattcactggcactcgttgatgcactttcgctagcactcgttgatgcactttcacttgcgcttgttgaagccgactcacttgcgctcgttgatgcagattcgctagcactagtagaagcagattcacttgcgctcgttgatgccgattcacttgcgcttgtggatgcggactcacttgcactcgttgatgcactttcacttgcacttgtggatgcggattcgctggcactagtagaagctgactcacttgcactcgttgaagcactttcacttgcgcttgtggatgcggactcacttgcacttgtcgatgctgattcgctagcactagtagaagctgattcacttgcactcgttgatgcactttcacttgcgcttgttgaagccgactcacttgcgctcgttgatgccgattcacttgcactcgttgaggcactttcacttgcgcttgttgaagccgactcacttgcgctcgttgatgcactttcgctggcacttgtcgatgccgattcgctggcactagtagatgcggactcacttgcgctcgttgaagccgattggcttgcactagtagaagctgattcactggcgctcgttgaggctgattcactggtactcgttgatgcactttcgctagcactcgttgaagcactttcacttgcgcttgtggatgcggactcacttgcactagtagaagcagattcacttgcgctcgttgatgccgattcacttgcacttgtcgatgccgattcacttgcgcttgtggatgcggactcacttgcactcgttgatgcactttcgcttgcacttgtggatgcggattcgctggcactagtagaagcagattcacttgcgctcgttgatgccgattcacttgcacttgtcgatgccgattcacttgcacttgttgaagcagattcacttgcgctcgttgaggccgattcgctggcactcgttgatgccgattcgctagcactagtagaagctgattcacttgcgctcgttgatgccgattcacttgcacttgtcgatgccgattcactggcgcttgtggatgcggactcacttgcactcgttgatgcactttcacttgcacttgtggatgcggattcgctggcacttgtcgatgccgattcactggcgcttgttgatgcggactcacttgcactcgttgatgcactttcacttgcacttgtggatgcggattcgctggcactagtagaagctgactcacttgcacttgttgaagccgattcactggcgctcgttgatgcactttcacttgtgcttgttgaagccgactcacttgcgctcgttgatgcactttcacttgcgctcgttgatgccgattcactagcactagtagaagctgattcactggcgcttgttgatgcagattcgctggcacttgtcgatgccgattcgctagcactagtagaagctgattcacttgcgctcgttgatgccgattcgctagcacttgtcgaagctgattcactggcactcgttgatgcactttcacttgcactcgttgatgccgattcgctagcacttgtcgaagctgattcacttgcgctcgttgatgctgattcactggcgcttgttgaagccgactcacttgcgctcgttgatgcactttcacttgcgctcgttgatgccgattcactagcactagtagaagctgattcactggcgcttgtcgatgccgattcgctagcacttgtcgaagctgattcacttgcactcgttgatgctgattcacttgcacttgtcgatgctgattcacttgcgctcgttgatgctgattcgctggcacttgtcgatgccgattcacttgcgcttgttgaagctgattcacttgcgcttgttgatgcggattcgcttgcactcgttgatgcactttcacttgcgctcgttgatgccgattcgctggcgctcgttgatgcactttcacttacgctcgttgatgcactttcacttacgctcgttgatgcactttcacttacgctcgttgatgcactttcacttacgctcgttgatgcactttcacttacgctttttgatgccgattcgctggcactcctcgttgaagcggattcgctggcactcctcgttgaagcggattcacttacgctcgttgatgcgctagtcgaagtactcgtcgaggtggattcctgttcactcttactcgtcaattga

SEQ ID NO: 31 - DNA, 132 bp, Lactobacillus reuteri
  misc_feature 1..132: note = Description of sequence: Lactobacillus reuteri 3630_00804
  source 1..132: mol_type = genomic DNA
atggagatattggtaacgttatttgatttggtgttttttattacgtttatagtcgcaattgtctatggtattaggtggtttaaaggaagaaaagataaagaaaatgaatctcttaagaaacgccgtttgtaa

SEQ ID NO: 32 - DNA, 240 bp, Lactobacillus reuteri
  misc_feature 1..240: note = Description of sequence: Lactobacillus reuteri 3630_00827
  source 1..240: mol_type = genomic DNA
atgattaacttaaacttagcaggcttagattttgtaatgacggcactttttattgtgttgtttacagaacagttgaaaaatgcccgaactcagcgtgatgctctgattggtttagcatttgcaattatttgtttactattttgcaacaagaatgtttttctattagtgacattagtaacacttgtcgcactgttttcattaaattacttaatcacgaggagaaaaaatgacattaactga

SEQ ID NO: 33 - DNA, 123 bp, Lactobacillus reuteri
  misc_feature 1..123: note = Description of sequence: Lactobacillus reuteri 3630_00947
  source 1..123: mol_type = genomic DNA
atgtcagagatgaaaaatcgcgtaattaattttcggaatgataacttagccaaacttatagtcaattattatggaaatagtcaattaagtgtgcatattactaataatatgttttttgaatga

SEQ ID NO: 34 - DNA, 786 bp, Lactobacillus reuteri
  misc_feature 1..786: note = Description of sequence: Lactobacillus reuteri 3630_01261
  source 1..786: mol_type = genomic DNA
atgaaacgcaaaattgcattagctcaacttgatattcaattaggaaatcctgccgaaaattatcaaaaagctaaacaagcgattgaagaagctgctagtcaccatgcagatatcgttgtcttgccggagatgtggaatgctggctatgccttagatcaattagcagaattggcagatgaaaacggtcaaaagacacaaaaatttcttagtgagttagcgttagaaaatcaaattaacattgtcggtggttcagtagcggtgagatgtggacaatcttttttcaatacaacctatgtttatgatcaaaagggaaatctaattagcagttacgagaaggtgcatttatttggactaatgaatgaagaccgatatctaaaagccgggcaaaaagaaaatcactttgaattagctggggttccgagtgcaagttttatttgttatgatttgcgattccctgaatggattagaacagtcactcgttatggaactgatatcttatatttttcggcagaatggccaagcaaacggattaaacaatggaaaataatgcttcagtcacgggcaattgaaaatcaagcctttgtagtcgcggtcaatcgtgttgggacggatttagagaatagctttaatggtcattcgttagtaatagatccgcttgggcagattatccatgatgcaggagaagttgaacaagtaagttatgcagaaattgacttagcgcagttagcacaggttcgggggccgattccggtgtttaaggatcgccgaccaagtctttatcattaa

SEQ ID NO: 35 - DNA, 504 bp, Lactobacillus reuteri
  misc_feature 1..504: note = Description of sequence: Lactobacillus reuteri 3630_01695
  source 1..504: mol_type = genomic DNA
atgcaaaataaagatgcttgtacatcaattatggtcggtaaaaaggcttctctcgacggtgctaattatattgctcgtaatgaagatcgcgtaaaagcaattgaacccaagcgatttttagtaaaaccggcagtaaaaggacgccacgaaacctacgtatcaccttacaataaagtaactgtagctttgccggaagagagaatgcgttatacttctacgcctacccttgatcaaacagccggacctaatgaagaagatggaattaatgaagcaaatgtggcagcttcctttactgagagtgtttatgcaaatgatcgggtgttagcatatgatccatacgtaaaaaatggcctggcagaagactcactttgtactttagtattaccgtatattcattctgcccgtgaaggagttgaatatactggaaaattaattgctgaattgggctctgctgagggaaatggaatgcaatttgcagatgcagatgatatttggtatatgtaa

SEQ ID NO: 36 - DNA, 1533 bp, Lactobacillus reuteri
  misc_feature 1..1533: note = Description of sequence: Lactobacillus reuteri 3630_01889
  source 1..1533: mol_type = genomic DNA
atgaattattttatcggtgttgatgttggaactacttctacaaaggcagttctatatgaccaaaatgcaactgtgttagatcaatttagccaaggttattccctttaccgcgatgctagtggaatggctgaacaaaacccaactgcaattgtcgaagcagtcgaaaaagttattcatgatgcagcacaaaaagcagatttaacaaatggaaaattgttagcggtatcattttctagtgctaaccaaagtgtgattatgctcgacaagaatttcaatcccctttcacgggtcatcacttgggctgatacccgtgcacgtgatgtcgccaacgaattaaagaatagtcctgctggtcagcaaatctatgctaaaacaggtacacctattcatccaatgtccccattgaccaagattatgtggctcaataagacacaagcagataaggttgctcaaactgcatattttggcgatatcaaatcctacctcttccaccagtttttcaatacatttaaggttgatgtttccatcgcttcatgtaccggaatgatgaatgtcaatacgtgtgactgggacgatcaagcattggaactcgctaacgtcgactgttcccaattaccagaaatcgtgaacggaacaacccaagcgattggcctaacagcagcggcgcaagcaaaaatgggtatccccgctgacacgccatttgtctatggtgcctttgacggtgctttatctaatttaggtgtgggggcaattaagcaaaatactgttgccattacgattggaacttcggctggtgttcgggtagtaactgaccatccagtgatcgatcctcagcaacgactcttctgttacgccgtggataaaggtttatgggtcatcggcggtccgcttaataatggtggcgatgtctatcagtgggccgttgaacacttagttgacgctagtgcagttaaaaatgaaaatattgatccctacactcttgctaaccgagttattgaaggtgttcccgccggagctcacggtttgctcttccacccattccttggcggtgaacgggcaccattatgggacgctaatgcgcgcggtagtttctttggactttcccacattcatactcgtgccgatatgctgcgctcagtaatggaaggaatttgtatgaatattgcaactgttttccaagcggttcgtgatcttgttggtaatcctgcaagcgtaactgcaactggcggttttgcgcgagctgaagtttggcggcaaatgttagcagatgtcttgaactgtccggtcaatatcccgaactcatttgaatctggttgtctcggtgcaatcaccatggcaatgaagagtttaggaatgattgaaaactatgaaatcattaaaacattagttggtgatatcagttcttatcagccaaatcaagatgcggttaatgtttatcaaaattacttaccactttttaagcaggtcgaaggattattaacaccagcctattcgaccatcgctaaattacaacaacaatctactactcattag

SEQ ID NO: 37 - DNA, 195 bp, Lactobacillus reuteri
  misc_feature 1..195: note = Description of sequence: Lactobacillus reuteri 3630_01932
  source 1..195: mol_type = genomic DNA
atgacaacatcaatgatccacagtagaagtatgttggcgaaagtgattgcagaatcaccttcaccttttattataccaattttttgtcctaatgtaataaagattatctttttatctataaattattttatgaaaagagtggaaaaggcaagaagagcaatcaaaaagccaattttaacaattttattaagttga

SEQ ID NO: 38 - DNA, 570 bp, Lactobacillus reuteri
  misc_feature 1..570: note = Description of sequence: Lactobacillus reuteri 3630_02243
  source 1..570: mol_type = genomic DNA
atgagcaaactattacttgatgaaagaccgttacaagttcaggcatcgttagctggagcgttgaaaagcttagacgaagctgttattctccagcagcttcactattggcttcaacgttctaatacagtaagagacaatcacaaatgggtctataacagcatggctgattggaataaacagttcccttggctttctagaaaggctctatcgaaccactttaagaaattagaaaaacgaggactaattattacaggcaactataataaattatcttttgacaaaacaaagtggtatcgaattgactatgacgcattttcccatttggaacaacgattgggtagaaactacccaacgaatgggaagaatctacccaatggagacggtaaaaactgcccaatcggagaggaagaatctacccaaccaataccaatagactaccaagagactacacaaaagactactacaagagataaagggcaggcacagccagcccaaccttccattgctgcacagcggcgagaagttgttgaatatctcaatcaaaaaaactggcaagcacttcaagcctga

SEQ ID NO: 39 - DNA, 438 bp, Lactobacillus reuteri
  misc_feature 1..438: note = Description of sequence: Lactobacillus reuteri 3630_02365
  source 1..438: mol_type = genomic DNA
ttgaataattttcaaaaggcaattttcttgttgcagaatatcgacaagcttaaacagcttaatggtaaagcgatgactcttactgagttctctaaaataactgatgtttcacggccaacgttgtataaatacattcagcatccagaaacaatgagtagttcgtttgtaaataaagcggccatgctctacgacaaggttgttaaatttcaagatattcttgatacagttcagcgtgaagataaacaatttaagactaccaggcaggaattgattaagcttttagagtctaatgtagctaatattgaagttacagattatacaaaagcaatcgcgacagtaattattagtgacttaaaagaagaaaattcaagtctgctaaaagcgttaagtaagcaattaccatttaaaccaaatttaaatgataatttgtcaaaatag

SEQ ID NO: 40 - DNA, 333 bp, Lactobacillus reuteri
  misc_feature 1..333: note = Description of sequence: Lactobacillus reuteri 3630_02435
  source 1..333: mol_type = genomic DNA
gtgaagatgaatagtatgacaaacaaccaaaaagaaagttggaacgttggcaactataaaatcaatgtattaccagatgatgagttccagcaattgttaaagaaccaacgccaacttcaacagatcattgaaagtatgccactaccaaccgaccccaatgttgatctagttaaaaagattcattcccaactccctattacaaactgggcttgggaattaactaaacaacgagaacatgaggaaaagttaaagaaacaaaagcagcgaattgcacagcaatcgcttaactatccaacaaacctcaagaaaccggataatggcctttccctataa

SEQ ID NO: 41 - DNA, 153 bp, Lactobacillus reuteri
  misc_feature 1..153: note = Description of sequence: Lactobacillus reuteri 3630_02436
  source 1..153: mol_type = genomic DNA
atgaattctaatttgaaaaagaatttgattatcgcaaatggatttctactactaataataatattttatgttttattacatatgggtccattaaatatgaaagtcttattagtaggattggtattaatgaatctgacagtaatatttaaataa

SEQ ID NO: 42 - DNA, 1395 bp, Lactobacillus reuteri
  misc_feature 1..1395: note = Description of sequence: Lactobacillus reuteri 3630_02437
  source 1..1395: mol_type = genomic DNA
atggataaattaacattgaaaaaactaattattattacattaggcatgctaatggtatttcttttaggtatgcaccttcatcaaaagacacactttaacaaaaacgtgaagattaataatattccagtcggaggtcttactgttcaacaggcatataataaagtaagtaatactaaaagaaaatcaaaaatctacattaacaaaaagttagtttattcaggtaaaagtactgactcaggttttaagttatctgataaagaaagatttagtaaggcgttacattaccaatacactttttttccctcacgaaaacatgaaaatttgctagttgagccagctgatttagataagtcagcgttaaataatattgattcggcaatagtagctaggattcatcagctcaatataggcagaaaggccccacgtgatgcatacgccgtttaccagaataataaagtttcagttattccagcaattgatgggacacgatatagtgaacaaggactttgtaatattgctaataaggaatttgttaatgggacaattcatttaactcctaaggttattactcctttatcggcaaacagtaaagtagttcaagatgaaaagaaacacctgagtaaactacaaaatcgatcggttgtttatcaggttcagaaaacaaaatataattttaaagcgtctaatgtcatttctaaagcaacttatcagcatgggaaataccattttgaaactgacaacgttaaatccaagattgccaatataaataataagcaagcaacattaggaaagagctttaaatttagaactgattctggaaaagttatttctacatctaatcagggaacatatggttggaaaataagtagcaagcaggcaggacaaacactctctaaagcgttagctaataatgttaagagcgttaatgccgaaaatgatatttacggtaaaggctatagtcatcttggtactggatattcggctgtgaataatcatgggcttggtaatacttatgtggctgtatcattagctaaacagcatgcttggttttataaaaatggaaaatgtgtactgagtacagatattgttagtggatcagatgacgctaataataggactcctaaaggtgtttggtatatcatgtatcaacaaacgccatcagttttacgtgggactaatgatgatggttccaagtatagtagtcctgttcagtattggtctccgtttactttatcagggtgtggctttcatgatgctagttggaggcataattggtctaaaacagcttataaacagactcatggtggctcacatggctgtattaacatgcatccggaaaatgcaggagacggtttccatgcccttactaaaggagaaccggtaataatttattag

SEQ ID NO: 43 - DNA, 1932 bp, Lactobacillus reuteri
  misc_feature 1..1932: note = Description of sequence: Lactobacillus reuteri 3630_02438
  source 1..1932: mol_type = genomic DNA
atgcaattaaaccataaattaggagttttcttggcagcgccatttgctctactggttttatcagctacaaacgtgcatgccgataacattcaaagtaatagtaaccagacaatcagtaatatgagtttgcaaactaatgacacaaagactcaacaaaatgttgtaatgtcaaacgatgcaaaagctcaaattactgtaaatcctagttctaatgctaattctagttctgtagcaaagataaatgaaaagaataatgtaaaatcggatactgacaatactaatgtcgaatcaaatgctgataatattgggaacattgcttctagcgattccacggcagtggctaattctgctagttccgataatattcagtcatttaacgtaaatacgcaggaacagcctgcaataaatgtatctgaactaacaaccgaagagtatgttacgaattacactcaacaacagatcaataatgcgacgactattcatgattactttataaatcaaggatggacaccaaatgctattgctggaatgcttggtaactttgtttcagagtcaggtttaatcccagacttacatcaatatggtggtgggcctggttatgggttagctcaatggccatttaatagtgtagtaaattggtgtcgtaataatggatatgattatcgtactttgcaaggacaatgtgcatatattgaatatcaaatgactcatggacagcagtattatccatcagcttactctagaatgaccgctaatgaatatatgcatagttatgcttcagcatatactttaggtatgatttggcttaataactttgagcgacctgcaaataggaatcagccagctcgtggtcaacaggctcaatactggtatcagtatttccaaagtcatggttctacatcagcaccggtacaacaaaatcctagtacaccagcaacaactcctagctcaagtcgaatgagtcaacacgggacattcaaagttgcttatggattaaatgtacgccaagcaccaagtacatcggcagctattgtaacgtattacaatggtggtcaaagctttacatatgattcaaagattgaagctaacgggtatctttgggtatcatacatgagttatagtggcgtacgtcgttatgttgcaattaagaatttgaataatggaacgacttacggttatgattcgaataacttctcatacagtgctcctgcatcttcaacaccatctactaatgtgccaagtacgccagcaccaagtacatctacttcatcaactgagaagcaatatggaacattcaaagttgcttatggattaaatgtacgccaagcaccaagtacatcggcagctattgtaacgtattacaatggtggtcaaagctttacatatgattcaaagattgaagctaatgggtatctttgggtatcatacatgagttatagtggcgtacgtcgttatgttgcgattaagaatttgagtaatggaacaacttacggttacgattcaaataacttttcatttaatgggactccagtaacatcaaataataatccttctagtactccggcagttccgcaaggtaataagggccaacaagttgttgctcttgcacgtcaacaaataggtaaaccttatgtttggggagcaaccggtcctaattcgtttgattgttcaggactcgtgcagtatgtttatcgtcaagttggtgttaacttaccacggactacaactcaacaagaatattgtggacatgctgtaagctttaataatcttcaacctggagatctaatgttctggggaaagtatggtagtgcatatcacgttggaatctataccggaaacggtaatgttttatttgcaccgcaacctggtcaaacagttaaggaacaaccaatgcgctattacatgcctgcctttgcaagaagagtattgtaa

SEQ ID NO: 44 - DNA, 2297299 bp, synthetic construct
  misc_feature 1..2297299: note = Based on Lactobacillus reuteri
  source 1..2297299: mol_type = other DNA
tctacttctactggcgtccctccagcaatcattacatcaggcgtgtagattgagaaagtaggcgttggaactaaaattatatggtggattatagaatgaagttagccacccagttggtggtaaataaaaaacgccattcggcgtgacatcaggtatcatattaagtgaaccaaacctatatgaaaggatgtccgtcaaatgacgcacttaaatgataccatgtctactagtttattgactactcataaaaagaatgctcatcttactaaagaagaacgtgtgatgattgcgactttaaagtcgcaaggactttccaatcgcgcaattggtcgccaattaggagttaatcatcaaacaattaataacgagctcaaccgtggtacggtccgccaacttcgtcgtcaaaaatctaatggtaagatttacgaatattcttactacatctatagttatgaagctggtcaggccacatatcttgaacatcaccgccattctggtcgtcgtcgcttatattattcttcaaagcaatttttacgattagctgatcagctaatgcttggtgagtttgacgaccaccattactccccacaagcggttatttataaggctcgagatttaatgaatgatggcaccctgatcccaaagtcggttgtaactttatatcaatggattaatgagggtgtgcttcgtacgtccaatttagacctctttgaaaagcctaaacgtaagcatcatcgaactcatccgcaagctaaaaggtgcttaggtcctaatattgctcaacgacctcaaactgcggaccaacggtccgaaattggccattgggaactagatacagttcagggacagaaaaacggtaatgacagtgttgtactagtaatgactgatcgcctttcacgagttaatatcacgagtaaaattgctggtaaaactgcgcatgcagtaaatcagttctttataaatttacgccagaaaatgggcacagatgcttactatcgcatctttaagacaataacctctgacaacggttcagaatttagtgagttaacacaagttcacgatcatgttttctatgctgatccgtattccccttgggaacgtggatccaatgagatcaataaccggtttctccgcaaggagattaccaaaggtgaagctataaataactatagtagtgctcagatcatagcgactaatgattggatgaatcactatccacgagctatgtttaatggacattcgtcaatggatatctatcgtaaggccttctaccaagagatatcacagctccatcaaccaataatcaattggtcagtattatttatttgagtccagtggctaacttattcttgaaatttaggaactaaaattatatctcccggattagtaattgcagtaattgcaacagaaatcccttctgttactccttttgtaacaagaatctctgttgcaggatcgtactgaaggccatatttattagccaacgtatcggcaatcgcttgacgcaatcccactgttccacgttggggagcatagtgagttcgattgttttcaatgctctcaattccggcccttttaacatattctggtgtgtcaaaatcaggttcaccaattgtaaacttaataattcctgaaatttttgaaacgtattgggaaaaatcaaatacttttaacgttggaacatcatttaagatcttccgcatatgttcactcatttcaactattttacttaagatcccctttttactaactacatattttaattatatgacagtttaaaataaaaagcatagaacaacatcgattagctgttgtcctatgcttaactttataaaattagttttcaaatgctttgatcatccggtcaagcaattcaatatctgtatcacgtgaataaatatccataatttcatagatttgtggtgcagaagttgaaccagtaaaggcaaggtttaatgggaagtataaaccacgacccttaataccagtgtccttacccacttccttaatagcttgactgtaatcaaggtcatcgccaccgttttcaagtttagcctttaagcccttaagaacagctaaaacatcttcattagcgaagtcttcgttgtccttaagcaaatcatagttgaatgattggtcaagaaccgtgtagtatgaccatgcatattgaataacttcaagaagcttattaatatcccgttggtgaactttaattgtcttcttaagcaattcagtcaattgatcttctggaatactttgaaggcgcttagcttcttcagtttcgccttccttaattaattccattgtccgatcagttaatttatcgatcgacatactcttaatgtattgagcattcatccaatcaagtttcttttgatcgaagtatgctggtgcctttgacatccgttttggatcgtacaccttaatcaactcttctttagagtagatttcacgttcgccaactggagaccaacctaggaatgcaataaagttaaagattgcttcgtgaaggtaaccgtgcttcttgtattcactaatgaattgaagggtatctttatcacgcttacttaacttcttacgagtctttggattaaagatcaatggaatgtggcagaaagttgggtgatcccagcctaatgcttcataaatagcaatttgctttggcgtatttgaaatgtgatcagcgccacgcaaaacatgggtaatgtccatggtgtggtcatcaactactacggcaaagttatatgttggcattccatcactcttttcaatgatgaaatcaccaccaaggttgtcagagttaaatgaaacatgaccacgtgcaatatcgtcccattcgtaatcatggtctttagggaagtggaaacgaatagttggcttcaatccctttgcttcagcagccttttgttcttcttcactcttgccataccaacgaccatcataatgaggaggttcattgttagccttttgccgttcacgcatttcagctaattcttcctctgttgagtaatccttgtatgcaatgcccttgtctaataattcttgaatgtatttgtggtaaataccttctttattccgttcactttgacggtaaggggcatactttggatttggcttatttggaccttcatcccagtcaattcctaaccagtgaagattttcacgttggctagcttcaccatcttcaacgttccgcttggtatcggtatcttcaatccgtaataccatcgttccatcgaagtgacgtgcaaataaataattaaataatgctgattgagcatttccgatatgtaagaaacctgttgggctaggtgcatatcgaactctgaccttttgatccattatctaagactctcctttagtaactaatcgaaatataattccgatttaaaattggttgctagtttaactagcagtccttaaaaacgtactatccacattataataacacgcttttattgcaacaaatataattgtatatgaaacaacatatttgtcaattaactagttgatttcgcatgaaaaacacttagcaagtaatcctgcataagtgttttttcattgcttattaacttattgtcattaattagtattgttccatatagtgttgccgttcccagtcagaaacgtgttgacgatatgaagcatattcacgagtcttggcttccataaagctgttatagaggtgttcacccattgaactcttgataacctcatcgttagccaaagactttaatgcgttgtgtaaagtatctggtaaatcatgaatatctttttcagctcgttctgctttcgtcatcgtatagatgttttcatcaacgttatgaattggtggtaagttgttgcgtaaaccatctaaaccagcttcaagaacagcagcgattgcaagatatgggttagctgatggatctgctgaccgtaactcaagtcgtgttcccattccacgatcactcggaattcgcacaagtggtgaccgattagaagttgaccaagcaacataaaccggtgcttcataacctggaaccaatcgcttataagagttgacgattgggttgcaaattgcagtgtagcttcgtgcatgcttcatcaaaccgcccaagaaatggtaagcagttgcggaaagcttatctttatcattttcatcaaagaaggcgttagtgccatcttgactaaacaatgacatgttgaggtgcattcctgaaccattaataccagaaagcggcttaggcataaaggtggcatggaaaccatacttcttagcaattgttttaacaacgaacttaaatgtttggatgttatcagcggcttctaaagcatctgagtacttgaagtcaacttcatgctgaccaggagcaacttcatggtgagcagcttcaacatcaaagcccatcttttcaagagctaagacgatgtcacgacggcaatcttcaccaggatctgctggttccatgtcaaagtaattttccttatcgttaagattggtagttgggttacccttttcatcagtcttgaagaggaagaactctggctcaggtccaatgttaaagtctttgaagcccatcttccgcatatcttcaagaacccgctttaaattgttacgggggtcaccttcaaatggagtaccatcagtcttgtaaacactgcagattacccgcgcaaccttcccgtgttcagcaccccaagggaatgcaagccaagtggacatatctgggtaaagatacatgtcactttcttcaatccgaacaaatccatcaattgaagaaccatcaaacataattttgttatccatcaatttatctaactgactaactggtaagtcaacgctcttaatcgttcctaataagtcagtaaacataactcgtaagaaatgaatatcttcatcctttaccatttggcgaacttcatcttttgtaaatacgtgtttacccataaaatttcattccctttcatacaatctccacagaaataatagatgaccataccaatctatctaacatctgcttctctccttaacactgtgacttagaataacaatagacagggcataagtcaattctatttaagagctttattttaataaaaaaatctttccttccgtactttatttttttaaccaatcatttataaactgcttaatttgattaatatcatcgggatgacgcaaaatatcaaaccagtgagtatcagccttatttctaaaccacgttaactgtcgtttggcataatggcgagaatcctgcttaattttttcaatcgcttcgtcaagactaatctcgccatgaaaataaggaaataattcatggtacccaatccccttacctgccggcagatcttcccctccttgatcaaataaccattttgcttcttctaacaagccgttttgaatcatcaaatcaactcgcttattgatccggtcatataaaacagggcgttcagtagtcaggccaattaagagaaaatcatttgttgctttgaactggggttggttggaaaataattgacccgttttcttaattacctctaaagcccggataacccggcgagtattagacttggggatccgagtactagctactggatccaagtcgtttaattgctcccaaacgtactcggctcccttttcttcagcaacctctttccaatggttacgaatgtcgagcgtttgttgatcaaactggtcacttcccaatgctagattatctgttaaggtttgaagataaaatccagttccgcctgcaataatcggtaaatgattacgttgagctatttcgtctattttttggtcagcaagtttcttaaaacgggctgcagaaaaacgctcttcaatattgcagatatcaatgaggtggtgcggcacatcccccatttcttcgggagtaacttttgccgttccaatatcaaggcggcgataaacttgcatcgaatcaccagaaattacttccccatcaaattcatgtgccagttttattgatagtgcagtttttcctacagcggttggaccgacaattgcgattactttattcatcttaactctccaatttttataaattttatgctaaaacctgtccttctcactggtaaaacgccattaattcttgcataatggaggtaacctataaattcgaggaggttttatgttatgaaacaattagcaaaaggtattttagttggtagtttagcaacagttgctgccattgctagcggggttcttactttccataaaactgtcattaaaccagcggaagaagaagaagaaaagtttgatcaaaaccgtcgagctgctatccgtaagggccgctcagcacaccaactttaattttatttaagattcaaaacaagaagccatgtagcgacgcgaagctagtttcatattatcttgctattgttcgtgaaagcagttgaggctggaagaaaactttgttttcttccagcctcttttattggttaaattttacaagaggctaaattccaaacgttagcaaatgattgtttagaatcctcaaccatcctgataaaaagcatacaagatacttttttaatacttggacttcttagttttaccgtcccacgcacgataaccatcttttaagatataaaggtggttatactcatgcttacctaaaaatgcagcggcctgggtacttaatgtcattccttcatcatataagtaaaccggcaagtccttccgcaattcgccatattgttgacgaagatatggataaggcaagttacgtgcaccaagaatgtgaccttgtttaaagtcattttcttgtcgcaagtcaataacctgtgcttttcgcattccttgcttaaagtcatcttgactaaggacagttgcatatctctttcgacggtaagtctgaaatgcccagctaaaaatccatactaacaagatgattataatgactgcattaagaatcatcaagccagagctaactccaagtaccacgatcatttccccttacaaattaatctgcgtttacaaactgacgagctaatgaagcagcaccgataacaccagcatcattacctaattcagccaacttcaattgagttgaagtccgaactgttgggaaggcaaatttttcaaagttttgctttacccgcttcaaaaggaattcaccagctgcggaaactccaccaccgataacaaggtattcagggttcaatgcgttacttaagttggcagttgctaaaccgaggtagaagcaaacttcatcaacaacagtattagcaagataatcattttccttagcaaggtcaaaaacaatcttggctgtaatttcgtcaccgttatcaatcattgccttcaaacgactgttaccttcatattcttccgccttatcttgagcgatatgaacaattccagtagcggatgcgtattgttcaagacatccatggtttccacaagtacaaaggtatccatctggcttaacaatcatgtgaccaacttcaccaccagcaccaacgacaccgtggataagcttaccattggagataagtccaccaccaacaccggtacctaaagtaataaatgcaacatcgtcaccttcattaccagcgcccttccaacgttcaccaagtgcagcaacgttagcatcgttatcaagagcaaattgcatcccagtgccttgttcaatctcttctttaacattttgagttgtcttccagtttaagttgtaggcaccaataacggttcccttttcacggtcaattgttccgggagttcccattccgattccaataaattggtctcgagacattttatataaatcaaggtggtgattaattgagttaatgatgtctggcacaatgtgtgaaccatcatctaaaatgttagtccgcaaagaccacttttgttgaatctcaccgttctccgttaaaattgcaaacttgatagtagtaccaccaaggtcaacaccaattaatttcttagccataatgattcctttcctgggtaaggtttaatacaatttaccccttttaattctcgtttgttcttcacgatgttctttacgcaagacaatctttgcttttgtataagttgagttatctacaactcctgattgatagaggttatcgagctcaatagccattaactcaatatcatacagtcgtttacccacatatacaaacacgttgaattcttttaatagttgctgaacatcgtatagtgtgcggtagtttcttgaggcgattgccataaattatcacttcaattctagagtcaaaattaccaaacttaccgttaatacagctccacttaacaaccgtttcaggtaatcaacagttcctaacatgggagcaccaacaataaatacaatgaaaaagccaccaaataggccgccaatgtgtcctaccaagtcaactcctgacaggaaaaaatccatcacaatattaataataataaataacacaaaaaagtacgacttaagacgcgaacaataacattatggtgaaagcaaacacccaacattaaaaatgcgccaaataatccaaaaatagcagtactagcaccagctgaaactgtcgatggcatgaagaccgcgctggtaagattaccaaaaaacgcgctgacaaagtatataattaccattcgccaatgaccaaaaaactcttcaatgtaacggccaatatataaaagcgtaacgctattgactactaagtgtgataaaccaacatgaaggaacacaggtgatactaaacgccaccattcaccttccctgattaagggcgtactacgagcacccatattcaggaaggttactgtattagttgagccacctgcataaactaaccagcaataaactaatacctgaaaaattattaaggtaagcgtcacgggcgccaatcttagtccctgtgtccgcatcttctatatccccggtaaatacaacactttatctattcgctgatcgaattcttctggttcccattcgttttcttcagccagttgcgttgtcaatgccattgaaactttagggcccttatagttttttaggtaacgatcataataaccgccgccaaagcccaacctgttaccagatgcggtaaaggctactccaggaacaaccatcaaatcaatctcatctggagaataaactttgccatcatgtggctctaaaataccaaaagacgtctcgtcgaaatcggtatcctcatttaattcaacaaattccatttgacgatggggcaacgtccgtggaacaacaatctgttggcccttatgacgcgcatgaaggataataggttcagtatcaatttcaaaagattgacttaaagtaacagcaattgttttagcccctgtccattcaggttgatcatatagcaaagatgctaactttcgctcttcgtaaagacgggtgtttaaatctaattgttgaaggcgcgcaatatatgcttgtcgtaactctttctttgaataagccattatgttatgaccgctcctttatagtgaagtaacaaacggtatcagattttattatcaccgcttgagtgaatttatgcaagcgtttttttataaaaataaataaaaagagccggtctcccagctcctttatatggtcattacttagtttcccgatgtaatgtaaccttttgttcccgtggacagtacttgtttaattcaagacgatctgggttgtgacgacggttcttgctagttaagtaagtccgttcgtggcatgaagtacattcaagtgtaatgttgacacgcattattttgacctccaaactatttcttttatttaacgtggttatttatcgtaaccctaactcgtacaactatatcatttattcttctatttggctagtaatttatcaaagtttgttaaggaaatttccttgacagtttaattagtcaccgaaacccttgggactctgaacagtcttccagtaggcttcaaaaatttgttttgccattgtcaggttggcaccaccatcggaatttgaagctcctggaatagccaaagcaactacaacttgtggattatcagatggcgcaaatccagcaaaacttagcgtagttgttgagtgcgacttgtagtaggtttcggcagtccctgtcttaccagatactgatggtttaacagatgccaacgctttaccagtaacataacggttagaaccatgaaccacttgataaagcccttgtttaacgacatcaaagtcagctttagaagcaggaatggttaattgaacttggggctttgttgtatattcaacggcaccaagttgaccattggctttcgtaccacggatttctttaacaatgtatgggcgcatccggttaccaccgttagcaatagtagacatatattgggcaagttgaatcaaagtataaccatcatagttaccatatgacaagtcaagtgctgaaccgatatgcttttggtcagcaggtcctgtataaccgcttgtttcaccaggcaagtcgattccagttttaacccctagtccaaacatgttgaagtaaccccgcgctttagcaaaaatacttggcttcatcgtaatttgcgcatttggtgtatatttcattcctgcttctttcatgagtagttgcatcatataagagttggaagaaacttcgagcgccgttgctgcattaattgccatatttgctgatccaccatggttaaaccatgatcccttagatgaagttccggcaagcttaattggcatatcggttaaggtattatttgttggcgtaattacaccatccattaatgcccccatgaccatcgccggctttacaactgaacccatcgtaattgggtggttgatagcaccaatttcatcaggggtttctttacctgttgctgggtcacggtcaattcctgccatcgcataaattgcaccggtatttggattcattactactgcatataccccagtagaatactggtttccggcagctgagtaattgtttttcaaaatcgattgaacttgcttttggaattttgaattaatcgttaatacaaggttatcacccttcttaccagggtacttagtcttttctttagttacatcatttccgttagtagtaacttcagtttgtgacttcgaaccagctaaagttgattggaactgtttttccagataactttgtccaacgctatcatttcgagaatatccttgagcaagcaatgagttaacttcatcacttggtaaaccagtagttgagacagttcctgttaacgattgaatatctgtaccttgggggtaattacgagtccaagacgttccaatctttacccctggcatttcattcaagtgttctccaactgctgcaagctctttagcactaacacccgtttctttaatataagttgtcgaaagggaatatgctccactcattgccgcataaattcgggcattattcttttgctgatctgtaagttcccatgaatcaggatgcttgctcaaatattcgagagctttattatatttagtatcttcagaatcggcatctgaagtcttgacatgtttcaaaacactcttaagccgctctttatcagcaaggtaataatcctcttcatttcgatcagttaagcgcgaatttttattagaaacagacacatattttcctaaacgattagcaatctgatagagctgatcagtagttacattagcccctttagtataggtaatggcttgatgagtttgattaccaacaagaacattcccttgtgaatcataaaccatcccccgttgtacattattcgtctgcgttgttgtatctgatcgctttacttccgctttaaatgatgttccttgcagaacttgaagataaaacagtcgaatagttaacgctaataacaagataccaacaatccataatagcatgttcagccggaatggaataattgactgcgcattttgacgctttttggcacgtgaaccaaacaagttcattattcgatcaaagaatttcacagttttataattctccttcatcgtagtgaatctattttaacaaaaattacctgctttaacagatagttaccactactaacgtgaaaataatactctttattttataagaaatgaagaatttattccaatgatttaatgaaatttaatgaacaatagtaatgaatatcattttaaaaaaggatatgataatgtggatgtgtctatttaattgagagaaggagaattttgctgtgtttttatatcaacatcatcgtttatatcgacgcaaaattttgattgcaagtttcctattaccagttattttgatggcttgctattttgcataccgtcaaatgactccctttggcaaaagcagcttattaaccgttgatctcggtcaacaatatgtcgattttttcagttaccttcgaaatactattctccaccatcccagcagtttcttttattcgtttagcaaaggacttggtggcgaaatgtttggaactaatgcgtattacttgctaagtccattaaacttaattttgttattcttccctgctcaacaccttgcaactgggataaccatcgttacactcgttcgatacggtctagcgggattgagttttgcttggctaatgcaaaaaacggatctacaacaggggtggcgaattttagcattcagtacagtctactcaatgaatggctggatgattgccaaccaattaaatatgatttggcaagatgctttaatacttttgccgttaattatttggggactcctcaaacttatttatcaaaaccgtgttggaacttatatcgcttggctagccgtaatgctgattgataattattatatgggctggatgattgccatctttacttttctatttttcctctggcaaacaccagcgttagcctcatggcgacaacggggagtaatttttctccgctatctcggcagttcgctgcttgcggtgggtatttcagcagtcattttattgccaactttctatgccttaatgcaaagtaaagggatctacactgaaaccaagattcacagccgttttgagtactttgctcctaaaatgcttgggaaacttgtccccggatcatttaattttaatcaaatgccaagtggtcagcctaacatttatatcggaatgctattaatgctcggtgcttgtctctacttcttcaataatcactttgaccttcgtcgtcgtttgattggggcagccatttctattttctttattttctcattctgttacgaaccattagatcttttatggcatgccggccagtttccagtttggtacccttatcgtttttcctaccttttctctttctggtgcatctatcttgcagctaaagtgcttcaacctgatttcaaaataaaaaagcgcagtgcacttatcctgacgttgcttattatcgcaatttactggtatgttggtacgcttaacttatcgtatattaatagcaatcaacggaatatcggcttatgcttttcgctgatcgctgttagttgcctttgtattccccgaacaaattcaccgcgcttatacgacgcgcttcttgttctccttgctgtctgtgatatttctatgagtgggtacacggcgcttaataagatctcttacgtttcacagcctgaatttggcaactacactattgctcttgataaaagtgtaaaaaaactaaagaagcatgatccgagtttctaccgcgttgccaaaacttttatgcgaacaaaggatgatcccttccaagcagactttaattctggtgaccattttggttcgaccttagagccgccaattccagccttcatgggtgcaattgggcagccagatggggatggttttgttacgtatactaatggaactcaagtgagtgatgcgcttcttggttacaaatacactatgaatgctcggaacacgtcagccggacaggcattacccctatcaggtttccgtcctgattggtacagttacccattagtaggatcaacttcggcagtcaatctccgtgagaatccacatgctcttccgatcgcatttggagctaataccgccatccttcaccttcaacggacaacaatggatccgttaaactatcagtcacagattttccaaacgcttgccggtcgtccaacacttcattcattatttgccgttcaaaactttaattccgtcaaattcaataatgttcaaagtgctaagcaaattactggcacgatctttagaaagcaaaacctgcttaaaccagcatcagttcagctagaatttattccgccaaccaacgattcttactacttaacgctcggaccaaacgttgaggataatgccacaattacgatgaataacaaaaaattcacccaatatgacacctttcgtaatacggtagtaatcaacgttgctcatgatcaaaaggggcaaaaagtccttgtcaatttgcaactaaagaaagctacactttggatgcaaaacgttagtatctatcaactaaagcaacggccatttatggcaagcttaaagactctccaagaatctcccttaaagattagttcataccgtagtaatcggatcgttggtacagtcaatctccagcgaaatcagcgagtattaatgactactatccctgctgccaagggttggcacgttaaagtagatggtaagtctactactccacaaaccgtgcttaatacgtttatggctattccaatgagtcccggaaagcatcgggttgaattttattatcggccaccgtttctcattctcgggcttataattacagttataagtctcggtttaactggttggtgggttaagaaagaacatcaaataaggacaatgtttgattaacaataaagctctttagcatactatcattagaatagtttatgctaaagagctttttcactatataaaaaattaatgctgagatgctccagtagaggcgtcagccttattatcggaatggtcatcagcgtcattaacaaatccagctacgtcaggtgtatcaccatcttcatgttgaaaatgaaaaaccggtccgtcggcttgcggatcatagtcaacagtagttataagatccttaaagaaccactcatctagcgaatcaatgtgatagttaataccatcctttttaacctctaaaattggatcaactggtgtatcttcacgagtgaatccttgtgaaaaaccatgatggacttcggtttgaccataggttttaccgtaaaactttattccatttcctgattctaatcccatttcgtcacgaaaccattgacttgcagcatcagtaataatcaatttcatttttcttccctccaacgttcagtgatatcgctttcatacatcttactatagcatagtagaaaaataataccaataagaaaagcgagattgaggaattcaccacattcctcgacctcgcttttcttattttaattaatcaaccttgacaatctttagcttgattgtcccattaggaacttcaacttcaactacttcgccaactttgtgaccaagtaatccttttgccattggagattcattagaaatcttaccgttaaatggatcagattctgattcaccgacaatttggtattcttctggttcttcatctggcaattcttgaatagtaattgtccgacccatagatacttcatccttatcgacatcttcattatcgataatttcagcatattgaagcatgttttcaatttgagcaattcggctttcaaccattgcttgttcgtcttttgctgattcatattctgagttttcagataaatcaccataactacgagcaatctttatccgcttaataacttctggtcgacgcttcaagcgatattcttcaagttcatcttcaagctttttcttcccttcaagggtcattggaaaagttttttcttcagccattataaacactcctcataatttatccagtgcaacattaccatttctacttcagcttgtaaacacctattgtaattccgtatgtccacgttttaccaaaatatcacggatctttgtcgacaataggtcaattgcaacttgattttcgccaccttctggcacaataatgtcagcgtagcgtttagttggttcaacaaattgatggtacattggcttaaccgtagctaaatattgcgtaataattgaattaagagaccgtccacgctctaccatatcacgttgaatccggcgaataatccgaatgtcatcatctgtatcaacgtaaaccttaatatccattaaatcacgtaaacgctcatcatcaagaattaagattccttccaaaataataacatcggttggttctacatgaacggttttggctgaacgtgtatattgtgcatagtcatataccggcatctcaatagccttattacttcgcaaatccgttagttgcttaattaaaaaatcggtatcaaatgcaagtggatgatcataatttactgctttacgttcatccattgtcatatctgactgatcattatagtaagtatcttggttaataatctggatcgcttgcccatgcaattggtcatagattttattacttaccgttgtctttccactaccggaaccacctgtaacaccaataactactggacgcttattctgttgaatactcatcaatttgtctccctcataaaactttctaatctgaaatagtatatagcactcttttgtgatgcgcaagataattactaatttaaattattaaaggtgaggtgaaagggaatattaatgcatcacaacatagtaatttccagggaagtattgttggtcagtaattttaactgtttcattttcatttggtgcttgaataatccgaccatctccaagtgaaatggcaacgtgatatggcgcatcatcagaaccgtagaaaacaagggccccatatggcgcgtttaaaacattatcgtgaatatgtggtcctaaagcttgttgttcatacgtcgtccgttgtggaataccgtaacaatattggaccaacccagaacaatcaaatccacctggtttattaccaccccatacataaggggttcctaaataagacattgccttgttaacagaatcttgtagactttgactgttcttgctggcttgatcctttttctcagcattattagcaggtgtttcatttttatctttggttggaattgtcaacttttgtcccacaaaaatcaactctttattttgcaagtgattagcggttgcaatatcatccgcactaacattatacttttgagcaatcccattcaaactatcgccagcattgaccgtaacggtcgtatcagcctttgcagttaccgtgcccattgccattgcgccagctacccctaacgacgatgcaagaattttctttgttgttgatttcattatttcgtttatccctctttatattaaatatcattattttattatcaaactattaataaaatagcagaaaattttcagcgcttcaaccactaattattagtttagtgattagccctataatataaatacgtaaaaaataattatttgcactaaaaaaaggccgaaaaaatccagccttttaatttttaacgaatttctgcatcaaccttatcttgcaagtaagcagtaaccttatcaaaggccgtgtttacttggtcttcagttaacgttcctttatcatcttgataagttaaggtgtaagctaatgacttcttgccagcaggaaggtgagaaccagcataaacatcaaataggtgaatgtccttaaggtaagcaccacccttttgcttaattgcctctacaattgttgcattttcaacatcatcatcaaccaagagagcaatatcgcgagtgattgaaggatacttactaataggtgtatattcattttcaatctttggtgcagccagtaataattctagatttaattcaaatacatatgtttctggaatcttatattccttagcagtttgtggatgaacttgaccgatgaagccgactaattggtcatcaaccataatatcagctgttcgtcctgggtgcatttctggacgatcactagttggaacataagtaatcttcccagcaatccccatattcttaaggtaacgttcaacgatcccctttaattggaagaaatcaaccggttgatccttcttattccaactattagctaccatttggccagtaaccgcagctgcaaggtgttcttgttctactggacgttcatcccccattggcaggaatattcggccttcttcatataatgctacgttatcaacatttcgcgccacgttataagcaatatcattaagcaagccactaacaatattcatccgggtagctacatggtcagaactcattgggaagtcgagtttcatcggttcagcaagtggcttaatttggaactgcttagccttctcaacagttgttaaggaataactaattgcttgagttaagcccattccttcgagatcatgacgacttgcccgaataaaccgttgacgtggcgtaagtcctccccggttacgcgtcatcgttggtaaagtagacggtaagttatcataaccataaatccgtgcaatttcttcataaagatcagctgccaggctaatatcccaccgccgtgctggagcaatcactgttaattgatcgtcatcatcaacagtgtaagcaaatgccaagcgatcaaaaatatcagtaacttgttccatggttaatgaagtgcccaggacatgattaatcttcgcaagggatagtttgattggcgtatcaactgctggcgcttcactaccagtaacaattccagcagtaatcgttcccccagcaagttccttaatcatttcagctgcttcattcaatgccgtttcaactgttgctggattgattccacgttcaaaccgcattgaagattcactatgaagatctaagcgccgtgcttgcttccggaccattactggatcaaaaatggctgcttcaagggcaacagttgtcgtatcatcacttactgcagttccttctccacccattgttcccgcaagagcaactggttggtcatcgacagttacaacaatatcatttgcttttaaggtttgttcatccccatctaatgtaacaaacttttcaccttcattagcatgacgaaccccaaagttgttaccagataattgatcataatcataactgtggagtggctgaccatatttaagaaggatatagttagtcacatccacgacattatttacaggacgaataccactgttccagaggcgaatttgaagccatagtggactttcggcaattttaacacctttaattacccgtaatttataagttggtgcaatcttagtatcattaatttctgcttggagaaggtccgctgtcttttcagtgccttcttctttaatcgtaatttctttaaaatgtggctttaatccataaaaggcagcgatatcattaacatttccataaatactaagcatatctccacggttaggagttacgtctgtatcgatgatcgtatcgtccattcctaagtacttaaatacaggatcaccatttttagcatcatctggtaagaagtagataccatcttcgtaatctttaggcgcaatcttgtcgctaaagccaatttcttgaagagcacaaagcattccatttgactcaacaccgcggatcttgccacgcttaatcttttggttatcagcaattcgcgcaccgtgaagggcaacgattacctttttaccttcttggacgttcggggcaccacaaacaatttgaatcggttcttcttcgccaacatcaacttgacaaacatggagatggtctgagtcagggtgattttcacattttactacttccccaacaacaatcttttttaatccgtcgctcagtgagtaaacgtcattaatgtccacagaggtacgagcaatcttttcagctaaatcttgaggggcaacatctaaatcaaggtattcttgaagccattgatatgatactttcatttcacattatcctttctggtcaaattggttaaggaagcggacatcattttggtagaagttacggatatcatcaacaccgtacttcagcatggcaaaacgatctggtccaagtccaaaggcaaaaccgccgtattcttctggatcaacgcctgacatcttaagcacatttggatgaaccattccggcaccaagaacttcaatccaaccagtttgtttacaaattgcacaacccttgccaaggcagttgaaacaagtaatatctgcctcaactgatggttcagtaaatgggaagtaacttggtcgcaagcgaacctttaacttgtcaccgaaaaggttttgagcaacggcctcaagagttcccttcaaatcagccatggtaatatttttaccaacaaccatcccttcaatttggtggaattggtgactgtgggttgcatcatcagtatcacgccggtaaaccttacctggtgaaatcatctttagtgggccttgactaaaatcatgtttttcgagcatccgtgcttgcattggtgacgtttgggtccgcatcaaaacagatggcgtaacataaaatgtatcttgcatatcacgagctgggtgatcctttggcaagtttaacttttcaaagttataaacttcttgttcaacttcatccccaactgctacttcataccccattgatacaaacaagtccacaacttggtcaatgatttgttgaataacatggggttgcccttgtgctactggtgttccaggaagagtaacatcaattgtttgggctgctaacttagcattcatggcggcctgttctagctcagcacgcttttcttcaatcgcagctgataattcatcccgcaccttgttagcaaattgccctactttaggacgttcttcagcactaagatcacgcatgccccgaagaactgaagtaatcggtcccttctttcccagcatcttgacgcggatttcattaattcgctttaaatcctctgattgtttaatatcttgcaatccttcttcacgaagttcggctaatttctctcttagtcccatattttcactccttaattcaaaaaagcctcatcccaatatagggacgaggcttcgcggtaccaccctagtttgtaggaacaaatcctacacactcaaataatcaataacggtgattggccggaataccattacgtatcagctccgaaagtgaaattcgccttagatcgctgattgcaattctcagctcatggttgcaactctctaacaggatcgtctagctactagctctcatcatcgcttttaattcaattacatattctagacaatcatctgtaaggcgtcaagcgttattttaaatccacttgtcactccatgcatgaacagcttccatgactgggcgcaattcttgaccacgttcagtcaaagaataatctacccgactagaaccttcgtaagtgttacgaataacaatttgttcgtcttcgagttcttttaatcgttcacataaaactcgatcgctgcactttgcaatgctactggcaatatccttaaatcgcatgttgccatttttaagtagtacttcaatgattaatccgttccatttctttcccaagatcataaacgtacgtgtaaattttggacaaagtttacagtcttcatcaagtgccttttctgctactaattgttccataatttaactctccttctcctctaccaagttgtttgcattcgacgtttcttaatctttcgacgcatctttgcacgtagcgggccaaagaattcatgctctgcttcgaaatcatcaactagcgatacaattaaactctccggatagcgtggcactgccaacgttgcgccaaacatatgcttaaggataatatccttttcttttttatttaacggggttagcttttcagcattgcgtaatgcaactcggggatgaataaatgcatgggttcctaaattaaacttagtcgtccgccaatcataataaaagagatcatgcaagagacctgcccgcgcagtactgcgataatcaagatgcatttttttagcaattttgtagctatcatacgaaaccgcaatagaatgttgcaggcgggtagagtgatgatgctgagtatagttcgctagcttttggacagctggctgggctaaaagatcggcaacgattgaaacatactctttatcggtgcgccattcattttttgatttcatgtaataccccttttctatattattgcaattatcatacacgattttaacgagaaaataaattaatttaatctagattttgattaagctgaaacattaaaattcctgcagagatagcgacgttaagcgattcggcttcaccacgcattggaatatagagattatcagttgtttgtgaaagaagatcgtcgctcatcccctgcccttcattgcccataattaaggcaaaagtatcaccaggatcaacagtccggaagtttttggcttggggattcagttgcgttccatacaccggagcattgattgatttaaaatcatcaatccactttcttaagtcaccctcaaacatttgaaggtgaaattgacttccttgcattgaacgaacaactttgggaccaaataagtctgctgagcgttgtccaactactactccagtaaacccagcggcatctgctgtccgcaccattgtccccacgtttcctggatcttgaacccggtcgaggaaaagccatgccccatgcaatggccctgctggtaaatgatgagaatctggtaaagcaacaaccgcggcaatcccttgaggcgttaccgtatctgtaatatgcttcatgatctcttcagtaacttcataggttgcattagccattccttcaagctctggatgggcagctaattgttcagctgttccgattacttctaagagctcgattccagctttggatgcctcttgaactaagtgccagccgtctaacaggtaagtaccagtctgacgccgtgcttttttggtttgcagcttcttccaatctttaacgtgctgattatgaattgatgttaattgttccatatattttgcatgctccttcttgttaattaaattataccatgttcctgttgtacaattgttattaactaataataagttttcattaagtcatgtggtaataagtcaggatgtaattatcactgactagcttgtcttgaccagattttgggcgcacttaaataagccttgataccaaggtgttttaaaacttaagcgtcgagaatcattttatctttctataccaattacctcttttcttgatagatttggtgatttttgagtaggaagaaaatcaccctgactaatttacgtgcggtaagaacgagagctcgtttggatggagtacgtttcacttctttatattttcgttggtaatattcaccgaaaactggatcttggatcctaactcggttggcagcttcaaccaagtagtatctgagataagcattaccagttctcttaagtggtgtattatcgctagcgtaatttcccgactgcttttcttttcaggaaagcccagcatatctagctaacttagcttcattgtcaaatcgttcgatttgaccaatctcagctaggattctagctgcgtataccggtccgatgccgggaattgagcggagaatttgttcttcatcaattactttaacaatcttctcaattgccttgtcgagatccttaatcattttttgaaaggctttaatctcttcggcataaacagacaagaccgtatccactgaattagcgacaactttatctaaacgataagaagagagaacagccttctgaattgttttagctagggcttcagggttcgcgaagcgacctcgtccatgttcagttaaatacgcagttaagtcggaaagagaaatattgagcaggtcatcggtagtcatatcttcagtcaaaagactcatcatcgtcgaaccgaagactgaagtgtttagctcatcagaaatcactagttcattgagcttatagtataagttctcaataaagtgttgcttagcacgaactagactttgaaccagttcataacgtgaacgtgttaagcgttgaagagcaatgtaattgtcctgacggacaaatccaactgagtagtgaccaacacgtaaataatcggcgatgtaaaaagcatcgatctgatcgtttttgtcttcagcgaaaacatcatgatagcgtttagttttcttaggatcgatgacaacagactgagtattcagctttttcaagtctgaatcttcttgaaagaacatcgctgggtgaaaactataaatggaagtagcttccattccgataataatttggtctaaatgatttgaattcgccgtgttgataattacattttttaattcggttgcgcctttcaaatcattaacgaagttaccttggaaaacaacttcgtggtttccttcggaaatcatcgaggttacaagatcttttgagctaacgtcaataccgacaaatagtttcattggaatggcctcctttcattaaaatttactggtcttaatctgatcactgcatgatagcccctaattacaatcactaaagacatcctcgcaagtatcagtgttcattggttagagaatcaaagctgcacctaatcctactctgaattagtcgattctctaatcgatacagcatgtgagttcgaaaattagttgattgcctgggcggcagacttaataagtagttcaaactacaggaggtattaacctataccagttgaccaaagccaatgataattagaggttatcatgcggtgaccagaagacaagatgtaatgtagcaaaatccgtaaagatttatttatagaatacgaggagctttaattatggttaattatcatcttaccattactggacgcgttcaaggagttggattccgctggagcgtctatcagttggcacaacaagcagaaatagaagggatcgttatgaataagcatgatgggagcgtttattgcgaattgcagggtcccattgagattgttaaacaattaatctctaaaattaaagctggccccactccttatgctcgaattactaaggttaaaatcatcgaaggaagcctgcaaaactaccatcattcatttcaaatcacgcattagttcgcgattagcggtagaattcaattcctgaatagagtaaaatacgtactattaacgtaattaatatacaaagaaataagggagtttgattcattaatatgaaacgaaaacgaataacgatcgctggggggctctttaccctcctgctgcttcttagcggatgtgtacggactactaagagcggtcgaccatacgggtttgtctatgactatatggctaaaccaatgcagcacttgatggaatggttagccagccacatgggcaataactacggttgggcaattattgtcattgtggtagttgtgcgaacaattcttttaccggtgatgttctcacaaatgaaaaaatcaaccattatgcaagaaaagatgtccaaggttcaaccattgattaaagaactaacagaaaagcaaaaagcagccaagactcctgaagaacaggctgccgttagtcaacaaatgatggctctgtaccgggataacaacattagcttaactggcggaatcggctgtctcccattgttaattcagctgccaatttttgccgccttatatgctgctatccgttattctccagacctttaccatgcaactttctttgggattccacttggtaagccaagtattatcttagcggtcttatcttttattgcctatgctgctcagagttatcttgggcttgtcagtgttcctgaagcccagaagaagcaaatgaaggctgctatttggatgagtcctttcatgaccttcttcatttctatcacttcttctgccggattaggtctttacttcttcattggtggattatttgccatcttacaaaccttgatggtcaatgcttaccgtccgcggattcgtcgccaaattgaggaagagagcaagaagaatccaattaaaatgccagaagcaccagtaattaacacccctagttcttcaactaaaccgactgatgcaattgaccaattacgtaaaggcgatgccaagccaagcgatcaagcaaaccgtaatcgtcaacgtaatgctggcaaacagcaacatcataaaaaataattattaagaagctgggagaaagcaaaagttttttctcagctttattttttcggaggaagacacatgattaaaccaattattaaagaccaacaattacttgctaaaaaagcaaccctaactactaaagctgatttgccccttgcaaccgatcttagcgatacgcttaatgctcaccaagctgaatgtgttggaatggctgccaatatgattggtgtaaataagaatgcaattattgcgcgaatcgggccctttaatgtcgtaatgttcaatccgcaaattgtcgctaaaagtcacccttatcaaactgcagaaggatgcctttcattaagcggaacgcgtcctactaaacggtataagcaaattaccgttaaatttcgcaatcagagctggcaaacgcaaacattagaacttacagattttgctgctgagattgttcaacatgaaattgaccattgtaatggaattataatataagcaatgagaatatttgctaaaatatcaataaatgaaataaggaaagtagaatcgccgggttctgcaacaaattaagttatgcttctcaaacaggcgtccaactgggaggatgggagcaagttttgtggaggttttaatatggattcaccaatgtcaattaccaaagaagtacggcattatgttattcgtaatgttgtcgccaccctcgggatgtcaatgtatgttattattgacaccctttttatttcaatcgcggccggggctttaggcttaactacgcttaacctggtgctccccctgttcaacgtttttaatggaaccgggctattgctgggagtcggtggcgccacaatcttttcgttaaataaagttatgcatcctgagagaataaaatcattatttagtcaactgatgatttttgcttttacttttgggcttatcctagcaatcctattaaacatttttgcaactccagtagttaatttccttggggcagatgatgccactcgtcagatggcaatcatttatttacgaataatttcatggagcggacctctctatatggttaattacattgccattaatttcattcgtaacgatggcaatcccacgttaaccatggaggccaccttaactgaaacattatctgttattctcatcgactggttctttatctttggaatgggtcttaaattggaaggagcagcattggcagtgttattttcgccagcaattagcttgatggttttaagttttcatcggaagtttgccggacgacaattacaatggcactgggttgtccctcacctaagaaacatttggcgctcagcacgtttaggggttgcttcagcattaaacgaattaagtactggtgttagtatctatttctttaaccatgttttattgcaactagctaataactatgccgttgccgcatatggcgttatttccaacattgccatcgttgtgctagcaattgctaatggagtagcgctcggtgttcaaccgcttgctagtcgggaatttggtaaatacaaatacaagaatgtatcgatgacattaaaaaatgggattatcattaccctctttctagcaacaatcagctttattatcctaattacctttaagcatccaattattgaagtttttaacacttctcattctggtcaactcctcgcctatgctagtgttggcctcccgatttactttacaagtgtattcttcagcgcgttaaatctattgttcatccttttcttaacagcaattggatcagcgcgagcatcattctctttatcgattcttcgtggttatattatccttctccccgcaatctttattctggcaaaagttgccggaattaatggggtctgggcagcagttccttttactgaatttgttattacttgcatcggtggaattatcatttaccagcgacttaaaaaattgaataaagagtaagtggaaaataaccttctcgacaaggcggtgggctaaggatagaacggtgattagcacggcacgggctgattatcgttcgtacttagactcgagccttgtggcgacgcgaagctagttccacgttatcttactattattcataaaagtagttgaggctgagagaaaacaaaagttttctcccagcctcctcttttatctactttgtaatcttctttgatgcgtgattgtagaaaatcaaagcaacaatcccaaagaagaccggaccaaatgccgtccagaatgcagtttgaaaatcatgctcaataattggttggatgcatgtaaagatgattcctaggcaaacaattatctcaacaaagacaactaatacatttgtccaaaaatgattcttaaatactacaaaatcatgtgggatatccttcttttgaaagaatgggaatgcaccaacaaggaagatatacggggcacaggttgaaacattaaccatatctgtcaagatttggtaaaaactagcagctgctgaacccccaaatgcaactaagaaaataatacacgaaacaaaaattgcctgaatccacattgcatatgctggcatcccgtgtttgttcaatgtcacaatttttttaggccataactcaggattagctcccatgataaaggacttaatcggggagtaaactaacaggaacattgctcctaacatccccatcaggccagctaacgcaatcattcgcgtaaagagaacaccaagaaaaatattagtagcatgacttaaccctagtgacacacctagttggtatcctaattgattaaagacaacataagtaacattacctaagttaacgcttgattttgcaataacatgattgtaattaacactaaagccagtcattaaaatcattagcacataactgccaatcgttaagagcgaaccaataactaagcctcttggaaatgtcttcgctggattcttcatactatcagtaactccacctagattttccattccaccatatgcaaagattgcgtaaacaacgaatgaaataatcgcaattggcgtcttaaaagcaggattaggcgactcaataaaactgctaataccatgaataggctgggcagtaacccccttgttagcaataatcgctactaaacttgcaataataaaaattgcattcattccaatcataaacgctccaccaaatgagctgattttcgtaatcccattaattccctgggaactcagtaaggttacaagtaagacaaaaagaatggccaagataccaattaactgattagaattaaagatccaaaaatgccattgttgggtagtatcatggccaaataatagtgccgacaatgttatccaaagtcgagaagcacttgatactagccacagaacccaactcgctaaccaaataaaggttccgataaaggccagctgttcccctatcgaaccagctaaccaggaatagattccccctttggcgtccttaaatgccgaaccatattcagccatcatcaaacaacaggggaagaagaaacaaactccagcaaggatgtaccaaaacatccccgcatatgccatttgatcataggctattgaaacattaccaaacccatatattgtcgaaataatcattaacaccaatgttggcgttgtgattaattttttctgctctttcgcagccactcctattcaactcctcaataaaaatcctcatattttagtatccgttttcattataccgcccttagttgaaaacatcgcttattttgtcggccattgagaaaacaattaaataaaaatgttttgtaataaaaaagtgaggataggagcaaaagtttctcatcctgcttctattctcacatcttaaatatttatttttttgtctctggatcttcaataatcggtaaaatgattctaaacaatgatccagcaccgactgaactttctagggtaatcgaaccatggtaaccttcaattagtcgtttggcaattgaaagacctaatccattgccgcctttcttacgactacgagccttatctactcgatagaagcgatcaaagacccgttttacattttccggtgagatcccttcaccaaagtcttgaataccaatctcaacagtattcattccccgtgaaagaataatatggatctctttatgatcatcagtggaatatttgacagcattgtcacataaaatcacaaggacctgttcaagatgatcgcgataaatatcaaccatgattggttctttcagatcgtcgtccaaacggaaagtaaagtctggatatagcatcttaaagttattgtagacctggtgaaccacatcattaacaatcgtatgctggttgcgaaaattaatctctacttgctctgctcggctcaaatcaagcatttcttgaaccaagtttttcatccggcgcgtttcaattaatgttgccttaattgagtcatccagcacttttggatcatccttgccccatcgctgaagcatctctaagtgtccttgaataatcgcaacaggggttcggagttcatgactaacatcactgacaaattgtgactgctggtcgatataccgctgcattcgatcaagcatttcattaaacattgttatcaattctgctagttcatcgttacgattggtagtcggtacccggacatctttagtaggatctgcactaatctccttaactgtgtcatgaattccatccaatggtcgaaggagaaagagggaaagaaagtatcccaatagcccactcgcaatcaaaaccaggcagagagccaagatacatactaatgccaactgatgataactttgcatataagcgtcaaggttattttcaacttgtaagtacccaatcaactgccgattattctgaccataaattggcatctgcccgaccaacacatcatgatcaggcccagcagcaatatgaatattgcgattagtcgtaaactgcggctttttaatataacgaccagtactcaaaatattctttccatcaggattataaatattaataaccaagtgtccatcacttaactctttaattaccggtcgtttatattcctctccagaaataatattcgaccggtttctgtctggatcaataaggtgactaacattctttttagttaagggcttatcaacagtacttaattgtgtactaatattagtcatcccttgattcaataattgtctttcttgatgaaataaattttgcgtaaacgcgctaaacaatgccatcgcaacgatacaaaagatgattaatgaccctaatgccgttccagctgcccacttaatttttagtgaaacaaaccgtctttcatctttttgcttcataattgatcattcctaggagcgaatcacatatccagtaccacgaaccgtttggatgtagctcttttcaccaggacggtcaatcttattccgcaagtaccgaatataaacatcaacaacattggtttcaaccttggaatcataaccccataccttactcaaaaggtcttttcgtgacataacaacattgatattttccattaagatcaacagtaattcgtattcccgcttagtaaggttaattacttcatcgccgcgacgaacaacccggttctctttttcaatggtaagatccttgtaattgaccgttgtttgatgttccttattattaccatcttcaatactgattcgccgcaataacgcccggacccgtgcaaggagttcttcaatcgcaaatggcttaacaatataatcatctgccccatgatctaaaccagagacacggtcaataacagaatcacgagcggtcatgataataattggtgtatcttttatttcacgaacccgccgtgcaacttcaatcccatttaactctgggagcatcaagtctagcaaaatcacatcaaaatcttgatttaaagctgcttctaatccagcacgaccatcaagttcaacatctgtatcgtaaccttcatgctttaattcaagttctacaaaatttgctaaattttcctcatcctcaataatcaaaattcgactcattaataactcacctactataataatctttttttacttgttatacgtattaataaaacacaataattttatcacaattttttaataaaccccagtattctctatactaaaaatctcgatttatcaaggaattagattatatcatttttcacttgtaaattcttagaaaattttaaaataaaaaaactatcctaggtccggcgcctaaaggatagcttttatattaattagttgttagtgttaacaacttgcttgccgtcgtagtaaccacaacttgggcataccatgtgggacttgcgaagttcaccacagtttgggcaaggggtaaggccaggtacatttaacttgatgtgaccccgacgcatacgcttcttagtctttgaagtcttccgtgctggaacagccatgtttgacacctcctaagaaattagaattatccacaaatggtttttaaccgtccgctattttttgttatcctgatcaggaaaaaggttttgcaacttagcgagacgtggatcaactttgtcatctttctgctgctgggccttgtagtcatcttcagagataacactccaaccttttccatttggcattggtttgccagatttttcttcggcagaaagaacccgtagcggtacctgttcaacgatgttttccgctaatgcagtatcaaaatcaattgaatcaccctttttaataaggaaaacaacctcatcttcatcctcatagcgggcaaagtgtgaacgatcatcgatatacgtctctgagaacgtaaaatcgagcggtaattgaacgggtgttaacgagcgactagatggaacggttaacgtcgttgtaacatgagcgctaatcgttgcatcaccatcgtcataagtaacgtaaccatcaactttaactggttgaacagctaaaataatatctggaaacagcttcgttaatgatgcgttcagatcaaaagtactttgaatatgaagtggttcatcttggtaacgatgtaattcagctaacgaccatttcaacgtactaacctcctaatgcaacatgtgcaattatactagtccccttatacgttgtcaatgttttttccttgacaaccttttagggaaccaaatctacttagaatattttaccaaactttatcaaagacgttaattaataattatcggcgggtgctttaaatcttgttcagccggcgtaaataactgatatagttttcctgctcggtaatcaaggttaagcaattgatcccgcatttcttggtcgacttttgtaatcagcggtagatcaagctgtttttttacctcatgaaggtattcacggccttgcttattaaaggccaagacatgaagataaggatgtttactatgctcagctacttcctcttgggtaatctgcaagatagtgtataaacaaactcgcaataagtgggcataagtataccgtttagtcttggtgaatttcataaacgaattaaagtcaagactccgctgggcagcttccttcatccgatattctaatccttccgccattagataagttgactgaagggttgaaacaggcgcttgaataagctgattacgtaataaaggataaaggtctgtccatgaaggaatactctttattgccgccaatatatctcccatcacttgtggaacagcttgccggtaatcgcccttttcattgattgcctgacgaattgcactcgcactcgcaatctttcctttgatttgctggtcgtgatagttactcccttgtcgcttgataggcagcaattcaaaatgataaccctggttgattttagctttggtataagcaaaagctaaaatatcattgggatcaatcagggtgacaccagtttgttccttcaattgctcgttaaattgggtggcataggttgcattatacttattaaaactttcctggttaaaagcttcttcagccttcaccaaacgggcaaaatcccattctggatgctcgctcccaaagacaatcgagtcaacgccaagagcatttaagagactcagcgctcctccggcaaaccggtgtgctggttggacagcataaaaaaccggtagttcaattacaaggtccacgccattcatcactgcagccctagcccgcgaccatttatcaacgattgtcggttcaccacgctgggtaaaattaccactcattaccgctaccgttacatctgccccggaaatttttttcgcttgctgaaggtggtagcgatgcccattgtgaaatggattatattcaacaaccatccctactgctttcatgtgaactctccttatttatgacacttaaagaaccatcgtgttggtttttcttctttgatagaagtcgaaaaatttgatcccacttcaacagaattaaaaccagcttgagataacatctgctttaataaaggcaattcataagcacgttcataatgggtttctccaacacgatcataacgtccatcattatctcgagtgaaaaaagctaattcgtgaattacgccatgctcaacatcatcatctttgaaagactgccacatgaacgctcgctgatgatccttatcctcatagttgaacatataccccggataaatgacatcagtttgataaggagaaatgacatcaaataaaaagacaccattatctttcaaatgatcagcaatttcattgaaggtcttttgcacggccgctgcatcgtctaaataacaaaaagagtccgcataacaagtgatcgcatcatactgcggtaaagcactgaggtcccgcatatcagcttgcaagagattcatactaactcctgcttccgtggcatgttgatcggcaatactgagcatctcagcagaaaagtcagcaaccgttacatcaaatccacgagcagccagcattactcctaaccgtccactaccgccagctaaatctaaaatgctcttagtattagcaggaaggtttttaattgtgaacttttcccacttctggtacatttcaggatcaaaaagctggtcatataactgggcaaaactttgataaatcattaatcattaatccagtcgttaatattgacaaggggtgcgtcggcccataatttttcaaggttatagaattgacgggtttcttcacggaaaacatggacaaccacgtcaccaaggtcaaccaatacccattgagcatgatttttaccttcaacgctaccaattttgacattttcttcatgcgctttttcaacaatggcattcgtaatcgcctgtacttgacggtctgagcctcccgtcataataacgaaataatcagccattggactaatttcatcaactttaagagcgacgatatcttctgcgcgccgaccatcggcagccttgacaaccatttctaataattgtttactatccattaatctatctctccttcatattgcggaacccatgcattataggtatctattgtctttggatataccggctttccattttcaatcaaataagccagcgtatgttttgtttggtaagcaactcctgcttgaaggtttgctgctgtaattactcgtgccttttttacgccggcaaagtcacgacccggctcaatatagtcagccatgtaaataacctgctcgagcttcgtcattactggcgctccagtagtatggtggcgaactgcatttaggatatcttcatcccaaatccctaattcatccttaattagctctgcgccaaccactccatgccaaattgcattaccataatctaagagcagcggattaagcccttttttcttaatttcggcaataaaatcttcgtcaggacgctgtttagcataatcatgacacaggccagcgatacttgctttttcaatatcaacaccgtattgagcagctaactcaatcgctgttttctcaacacgtaatacatgctgaaatcgtttattctttaacgcctttttgagacggtcgataagttcagaccgtgtcattgggatataacttttattataaactaattcttcattcacgatataattgatgctcctcaataaacttgcttacggcatctgggaccatatacttgattgattggccacgttgcacccgttgtcgaatatcggttgaactaaaatcaactgttgggacatctacccaaatcactggatatcgtgtctcattcttcgctccttgacggtgaacaccgacaaaatggaaatggggtaagcggattaaatcattgatccgataccacttgtcaaggtaatcgaccatatccccaccaataataaagtaataatccacattagggtgcttatctaacaaatacttaatagtatcgtaagtatagctgactcctccccgctctaactcggtatactcaatccctaaaaaggggttatcagcaactgctaattcgagcatctgtaaccgcaattgcggatcaagcgaatctttatgatcaacatggggaggtttagcatctggtaaaaaatcaactcgatcaagacaaagggcatgaccaacctgatccgccataaataggtgagcattgtgaataggattaaatgttcccccatagaggccgatccgcttacggtgtccactaactttagtctccggttgcgcctgggtttgcaccttgtctactacactacagctttgcaaaaccgtcactcctacttttacttagatttcagctactcgtgatgataattcacgggcatccttatttgctgaaactttaaataaaactaatacccgaccaataacttgaactacctgaatagaagttttttcttcaattaattcgcgaacttcatcagttgtaacatctgagttttgcaaaatgctaaccttaattaattctcgacggtcaagtgcgccgtctaattgagcaagccaattgtccgtcagaccatctttacccacagaaaatagtggttgaagatggtttgcttgtgctcgtaaaaatcgtttttgttttcctcttaattgcataagtctttcctttcaaatactaattaaatcattgcgcgccgtacaagagccccgacacctttcggaacccatgcagcaacagtcgttttcgcaggaacagtaatccatcctagaccttcaaagacaatatcgcttttttcggtaatgtggaactcataacgttctaatggtgggaacccatccttttcatcgctagtcggtggggtaagcaaatctcctaagtgtttagcataaaaattatcagcattgcttagctttgtacggtgaattggtaaattattatcaaagtaagcaaccattcccgcacgttcaccatgaagataatcaaatcgcgcaacgccgcctaaaaataatgtttgaccatcatttaattggtaagtctttggtttaatctctttttgaggtgccacaatcttcaagtcttttggcgataagacatgggccatttgttcttgatggataattccaggagtatcaactaaaacatgcccatcatcaagcggaatttcaatcttatcaagagtagttcctgggaagcgtgaagtagtgatcaattcttttactcccgttcgttgcttgataatttggtttattaacgttgattttccaacatttgtaacacctacaacataaacatctcgattgtgccggtatttttcaatcacatcaagcaagtggtcaatctgatggttctttttagctgaaacaagaaccgtatcaattggacgcaatccggcaatatttgcctgttgacgaatccagtcagttaacttgggccgccgtagagaacgtggcaacaagtcttccttatttccaactaataatactggattatcaccaacaaaacgatgtaagcccggaattagacttccattaaagtcaaaaacatcaacaacatacacaattaaagcattggcatcccgaatctgatttaataggcgcaaaaagtcatcatccgttaatgataccggagcaatttcattgtagtgccgcaagcggaaacaacgctgacagtataattctcctgtctcctttcccttctcaagggctgacttaggcgtataacccaagccattaggatcttccgtttggataatactcccacaacctatacaacgtaattcttcagtttgttgttcttgttcagtcattcaaatcctcctgccattttaaatctggatattttttgtttaagctcttccaaacacggcgttcaaagaagcggttaatacgggtatcccacttatctgtatttaatagggggcgtactaaaatgcttcgaatgcccgcttggttagccgcagcaacatcagtcaataactggtcaccaaccataaccacttcatcttttgctaaattaagttttttccgtgcacgatcaatcccaaaacttaagggctttaatgatcgcgaaacaaatggaaggtcaaggctattaacagctttcccaactcgttccttactattattagaaataacaattagcggaatatgggcttctcgtaaagaatccatccattcctttaattctggagttccatctggattgttccaagcaatcaaggtattatccaggtcactaaaaacagctcgcactccctgctcttttaattgggcaggagaaacagaatatattgtattaaccatccatgttggtttaaatatctctaacaaagttgcacctcatcaaatttaatattccaatcggttaacccgattaaatgttctagtatttaattatatcgtgtgctttactcggaaagcaactaaatcgagtaggagataattgattagttcgattatcgacctctcacatcaccgtacgtacggttccgtatacggcgattcgacaacttaatcacattgaattgactggagcgtcttggacatattcataagtccaagttgttccagttttctattagttagagaatagctcaaggccttactatgtgcagttcgccagtagcccttgcgggtactagcgaagacatatgcatcacgctgggacagccccaacttctgtaagttagttaccttagttttaaactttttccattgcttccagatatactgccttattcggaccctcaactacttgtcgaggcgttgaataaagttagttagtttcccaattgagtagtactgaagccacccacgcatttttcgatgaatttcttcaaacattcttgtcagagatattccacgattacgtttagttaataacttcagcgctttctttactcgttgttgcgattgtttagctggacgggcgtaggccccattgtggtctacacccaacgaaaagccaataaacttcaaccgtagagggctaccgactttggttttatctgggttcaatttaactttcaagcgcttttctagaaactgggtaatgcttcgcattactcgttctccggctcgttgacttttaacatagatgttacaatcatccgcatagcgcacaaagtgatgaccacgtctagtcaactctttgtccaactcatttagatagatgttcgccagtagtggtgacaatggccctccttgtggggttcctttttcactcttagcgaaaagcccatggtctaagactccgctagttagaaacttacgaatgagtcttagtgtccatgggtcatcaatatattgttgaagatacttaatcatcaagtcatgattaacgttatcaaaataggcttttaggtctaagttgacaactcttcgataaccttgattttaaagatctactacttttgcaatagcgtcatgggccccacggtggggacgaaagccaaagctattatcagagaaaacacgctcaaagataggcgtaagaatttgggctacagcttgttgaaccattcggtctaccaccgttggtattccaagtcttcttactccaccattaggcttcggaatttctacccgtttgactggggctggtttatacttgccctcacgcaaactagcgatcagttccgtcttattttctctgagatatggcagaaggtcattgactgtcatatcgtcaacgcctgctgctccttttatttctcttaactcgcaaataagcctgattaaggttattgcgatccaagactaagtcttggatcgtgacactcatgcctttaccttcaccataaccggtactacgcgcccttgtgtactttcggttttccaaacctatcctcgacaagcggtcagcttgttgttctgttttctgcgattgtcgcacctgattacacctccgatataagttacaagttattgtcgttcagtccttcatatgattattcaaactactatgacctcggctgacttctggcttactcaacactgcatcactgcaccgcttgtttctgcggaaattaaacttattcctcttgtcggaaacgtgtaggccagatctccccgggtaagaatattagctttcgtaccatgtcatcgttagctttactgagaccaacttcgagtagtattggacttcaacttgtctagcagccttatccagttaatttcagccttatagctacttcttgttcatcgatgcagtactttgccttagacttccttcagattccacctcacggtggacacccttgtccttagctcatggttccgactactacggcccatagcggactttcaccacctagctaatacccatgccgggcgcactaaaaaaagccgcttatcatgcatacgcatcataagcgaccgaagattatttaggcttagttaagagctttcttagcttcgtcaacgagtgccttaaatgcatctgcatcgttaacagctaaatcagctaacatcttacggttaatatcaatgttagcaacctttaagccgtgcattaacttgctgtaactaatgtcgttcatacgtgcagcagcgttaatccgagcaatccaaagttcacggaacttacgcttgttgaccttacgatcacggaaagcgtaagtgtaactcttcattacttggtctttagcagtcttgaaaagacggtgctttgaaccacggtaaccctttgctaacttcataatgcgcttgcgacgtgcacgcgtaacagttccacctttaactcgcatgttgaaatcctcctacgtatattaaatagttatttttgtgaagtttacttaaatggtaataacttcttgtaacgctttacgttggtcttgtccatcatgctcaaaccacgtaattgacgacgttgcttcttagtcttaccgtggaaacggtgactagtgaatgagtttccactcttgaatccaccattagctgtacgcttgaaacgcttggcagcagcacggttactcttcatctttggcataactaattcctaccttcttaaattaattctttgctttatcagcagccggagcaagagttaagaaaatactccgcccttccatcttcggacgttgaacaacagtagcgatgtctgaagtttcttcagccattcgttcaatcatgtcacgaccgatatccttatgggtaatagcacgaccacggaaccgtaatgaaatccgtaccttatcgcccttttcaatgaacttacgaacacgctttaacttaacattaaagtcattagtatcaattgatggactaaggcgaatttccttaaccgttatcgtcttttgcttcttacgagcttcacgctctttcttttgcatctcgaaacggtacttcccgtaatccataatgcgggcaacagctgggcgtgcctttggtgcaactaatactagatctaagttagcttcttcagctaattgtagcgcttcacgcttagacttaatgcccaattgttcaccatcttgaccgattaaccgcacttcccgtgcacgaataccgttattgacaatcatatcttgtgctatggcaacgcacctccaatttttttagcgaaagatcaagcaaaaaagcgaggtacaaaagtaccccgcttcataacaacgaccttatcatagtggtcgattatcattcatctcgtcagcccggcgatcaatatcacctaggcgagaagcgggtgcttctgctttttctttcaacgtttattagcttactaaattcaaagtttaatgtcaagaactttatcccttatcacgcaaattctttccttccatttcaatctcacgtgataagtacttgattctttccataatgcgagccgctttgaggggctcattatcgccttgcgcattgatagcaaggtggttattttgcaactcatccattgaaaaattagaactaaagaaagttggtaattcttcttgcatccgatattctaaaattactcctaaaatatcatctcttacccatgttgtcattgcaccggccccaacatcatcaagcattaaaatcggcgcccgtttaatagcatccaatttttcgccagtattattttgcttaattgaattccgcatttcaacagcaaaactagggaaatgaaccatcgttgttgcaactcccttactcttagcgagttcattagcgattgctccaaggaggtatgtttttccgactccgaattttccatataggtaaagtcctggttgaaaattatctttttggtaattatctgtaaagtccatggctgcttgaattgcctttgtgcgtgtatcagtttgggtatcttcatttaaataataatcatcatatgacgcatttttaatgaacttaggcatattaatcgagttaactagtcgttgaatataacgttgtcgttggcgttctaataactgtttagttggaacgtaggttacgtcaatttggcctgcactgataaccaattgcggagaatatccaggggcaacagttggcacgcctttttcaattaattgcttttcatgaaaaaactcataaagctttgattgtccccgtttaattgcttctttactaagacggtcacgattttcgtttaagaatgcttgaacatctttatccgcataaacttgcttcatcgtttgttggatattgtttgctatattttgaccgcgcattaactcttgtaaagttttgtttagtgactgcatgctgccacctcctttagctgctacttcttcttacgattagcgatccgttcacgcagtttggcaatttcttgtgaggaagcctttttcatcaactcactcgtgtctttcttgctccatgctggcatcggttccttaatcgttttgcgccacttatttttctttggcgtctttgtttcctttttcttttcttgcgactgcttgttaaaagtctttaattggacaatggcttgttccccattaattactccatgttggagccagttattggcaattgcatcgacaaaattagctgtcaaagtagaatttccccggtcactaatcacataccaagttaagatattaatggcatcttgggtaagtttttcttgcgctactaaacctgtcagaatatgacgttcacctgaagttacgtagccacccgtttgacctttaagaacctgaagaaattcgactggggagtaatccttagctgtcgccaataactcctgatctttactagtcagttcactatttctatttgtcaccggcgcttctttttccgctacttttgtcgttgaagaatagacaatattataggtagacgcaacaatttgcttaaattttttcggattgaaatgattggtttgcagatcaatcgaccgcaaaaccaatgtcttcatcgttggcgcatcaatcccatataattgatgttctaataatattaggtctcgattattttcaaggtctgcactgacaatcggctgattagccagcaagtgaatgagggttgaccaatcaaagtcatcgcttatccccgcagttaactggggttgcttttctactggtgcctgttttcgcgccgttaaaatcgcttgtggtgtttcagtaattgactgcgagttaatatgaaattcttcaaaaaagttgtgactcacattagttagtgaagtattagaagaagcaagcttgtattgcctactttgcttagtcaaacgtccaaacgcatcttctcctacttcctctaaaagtaaaatactcagcaagttatcagctaaaaatttttctggagtaagggtcggctgcaattcataaacgtatacgtccccgatctcatcgtgctggaaataagtttgcactaagccaactgcctctaaacgatgaagagcctccagtacttgtcggcccccagcatttacttgggctaacaggtcactttgcaaggtccggttagcaatcgtaggattaggcagcaagcgcgcttttaacgcataaaaaaagctaaacgcaactggtcctaaaattggctgataaaatgttgcaaaagtctggtcattaaaactaataaatgcagtgctggccgtaacaacataaccggcttgcgggtcaaaagctgctgcagtcattttacagccctcctaagttattttttatgttctgccttcatcatggtttcaagttcgctcataaaggcatcaacgtccttaaattggcggtaaacacttgcaaaccgaatataagcaatctcatcgacgccttttaattcgttcatcacaaatttaccaataatttgactggagacttcgctttcaccaatactccggatttgtttttccactttatctgcaatcttggtcaatcgctccatactaaccggtcgtttttctgccgagcgcacaatcccattgaggatcttttggcgactgaattcttggcgcgtgccatcttttttaattactagtagtggcgtttcctcgtaccgttcaaaggttgtaaaacgaaagccacaatgaatgcactcacgacgacgacgaataaagcttccgtcttcgcttggccgactatcgacaacccgtgatccatttttgtgacaatgtggacagcgcaatgtgtccccctcctttatagtataagtactttattttaccacatttactctgcttttagctgatttattagggatgcgactcgtttttgcagggcagcctggtcaccattattatttattttaaaatccgcccgcgcttctttatctgataatggcatttgggcaacaattcgcgcttgcgcttcctctttagaacaatgatcacgagccattaaccgcttaagctgcgtttgtggatcagtataaacaactaccacataatcacaatcttcatcataatgttgctcgaataataatggtacatctaacaccacgagcggaataccctgtttttttaaagtattaacctgcgcaaagatagcatcgtaaattaatggctgaagaatctcattgagttttttcaacgcttctttatcattaaagacaatttttgctaaggtttgccgattgagctccccagttggcaaaagtactttcggaccaaatactttgacaatccgtgttaacccaaccgagtctggtgtctggacttgccgcgctacttggtcagcatcaatcaccggaatcccagcctggcgcaaaatagtgcttaccgttgtcttgccggttgcgattccacctgttaatccaactatttttgtcatttcttattccttcaatacttgacagtgtggacaaaatgtcgttccacgttcagcaaccttaattttaaccattttcgtgccacaacgcggacattcatcccccgcatgaccataagcttttaagcgatcttggaaagcgccggcatcaccaaatgcattcgtaaaactatgcacagtggttcccttgtacttaatcgctgtcgccaattctttgataatatttttccgtaattcagtaatctggctagccgttaaagtattggctggttgctccggatttatccccgtcatccatagtacctcatcaacgtaaatgttacccagaccggcgacatgacgctgattaagcaagaatggcttaatctttccccgactcttttttaattcagctgtaaagtatggcaacgtaaaggcgtcttccgtcggttcagggccaatcgtcttcaatccgccgacattcatctcatcaccggtttttaccagtgtcatccgaccaaatttacgggtatcttgataacataattccgtgccgtccgtaaattcaaagacaacatgggtatgtttatcaattggtccgccaatcggttggttgtaatattttccttccatgcgaaggtgtgaaatcatcgtcaaatcattagtaaaacgaaaaagaagatatttccctcgccgatcaacattttcaatcgtctgtccaatcaacgcctgccgaaaatcttcaacgtcattggtaatcgttttaccataataaacatcgatcgcgttaattttacgcttagcggcaatcttcagcaaaccgtggcgaacagtttcaacttctggtaattcaggcatttaattcctccgatctattttttaaggtcataccaggtatccccatacttactatctactttaagtggcacatccaacttaacggccgaatccattacttttggcaccaattccgatagaatcgggatttcttcctttggagcctcaaagactaactcatcatgaatctgcaagagcatttttgcctttagatggcgtttctcaagctcatcttgcatccggatcatcgcaatcttaatgatatcagcagcgctcccctgaattggcgtattcattgcagtccgctctgcaaatgatcgcttgctaaaacttttggcatgaatatctggtaagtaacgacgacggtgagtaatcgtctcaacataaccattttctttagcaaacgcaattgtgtcattgatgtatttctttacaccggggaattcatggaaataattttgaataaattcatgagcttctgcacgactaacatgaatccgttgtgccagtccgtaatcactaatcccgtaaacaattccaaaattaactgcttttgcccgacgccgcatattacggtcaatctcggcatcaggggctagatggaaaattcggcgagctgtactagcatgaatatcttcaccattcttaaagtcttcctgaaggttcttgtcaccagtgatgtgagcaagaacccgtaattcaacttgcgaataatctgaagagaagatttgccaaccttcatgactaggaacaaatgcctttctgattaagcgcccttccggcaaccgtactggaatattttgcaggttaggatcaacagaagacaagcgaccagtttgcgttaatgtctgtaagtagcgcgtatggatcttctggtcatttgaatggataactttcagcaaaccagtgatataggtagattgaagcttagcaatttgacgatattccaaaatttgctcaacaatcggtgacttatcagctaacttttccagcacatcaactgcagtggaataaccggtcttggtctttttgatcactggcaatttcaatttttcgaacagaatatggcctagttgcttagtggagttaatgttaaattcctcgccagcttcttgatagatctgactttcaatttctgatagccgttcagttaatttactacccatatctttcaaagtttgtgcatctacatggacacccgcgatttccatttttgcaagaacccgggttagcggtaattcaatatcggtatatagcggcgtttgcttattttcatctaatttggcaaaaaaatccttacgcagatgttcaattgcccgcgctttcgtagccaggtgactaaagaaggtctcgtcatcatcaggcacagcacgcttagcacctttaccataaacttcctcatctgttcgtacatcatcataaccgtgttcctgagctacttgtcccaggtcgttactattgtcattagtatttagaaggtaagatgccaaaagcagatcaaaattaatattttcaagcggaataccgaggcgatgaagtccaacgatttgtgccttggcattaaagacattcttcttaacactatcactctggagtaaatccttgagaggcgcctctttaagcaggtccacatctcgactcgtaaaccagtgtccttcattgccgatcacaaaaccagcgaatggtgacgtgtggtaattttctgctggcatttcaaggtaaaaacttacttcacccgttaattgtcctagttcatctaagttatctttagttaaaactgtgtagtcaattggagcaatctcagcttcgtcttcctctccagccccatcgatatccatctttttcaagaaagatttaaagcccatctctttgtaaaacttaatcaagtcatccgtttgtggaccttggtattgcaaatcatctaggccaatcttgagcggagcatcccgaagaattgtcgctaacgtcttacattggcgagcaatctcttcatcctcaatcaaatgttctttcatcttactctttttgaggtcatcaatatggtcataaagctcttcaaccgaaccaaactgtttcacaagtttgatcgccgtcttttctccaattttagttacaccaggataattatcggaagaatcacccatcaatgccttcatatcaattatttggcgtggggtaattcctaatttttcttcgacatgcgctggcgtatagtgttccgtgtcagtaactcccttgtgggtaacggcaacggttgtattttcacttgctaactgggtaaggtcccgatctccagttacgatcaacgtcttgtagccagcatcatccgcctgcttagccaaagtaccgataatatcgtcagcctcatagttagctaattcataactatgtaacccagagtctttgatcaattcacgcacataagggatttgctcggtcaattcattaggcgtcttgtttcgaccacccttatagtcatcatacattttcgtccggaaggttaccttccctgcatcaaaggctactaaagccgtatccggtttaaagttttgcaacacatggtcaagcatcaacttaaagccataaattgcagccgtatgcaagccgtccttatttgtaaacttgtccatttggttatgcatggcaaaaaatgcccggaaaacaatactatttccgtcaattaacaataattgttttgtcatttaattcccgcccttctatcgctaatagtaattgtaccagagaatatagcaatggtttagtttcttgaccaaagatttaagttataattaaaatgaaaaacattagatgcgagatgaaattcatggataaactcattaactatcaaaagccagcagaagcacggctctttgccctccttctcacctttagtggtggtttcatcgacgcttttacatatatcaaatgtgggcgaacaatggcggcggcccaaaccggtaatatcatttttcttagcgctgcgctcgcaaaccacaatttccttggcgtggttgatcggctaggttcattgatcgcatttattgttggattagcaatggttagtattctccatgctcatttaaaaactgattattggcgagtagtttgtttattgccaattttattagtaggagcaattatcggttttcttcctgacagctttcctgattatctaatggtaccagctgtttcatttgggcttgcaatgcaaagtgccgctttcagcaaaatcgaggggcttgggtataacagtgtctttacaagtggcagtgttaaaaaagctgcggttgcctggagcgaatattattttcatcacgatcgctcgcaacgctcagtggcctttagttatttaatgatcgtgatctgttttacgctcggcgcgatcatttccgctcagttgcttccctttttccgaatgaaaactatctggatcgcaacgttcttgattctcgtaactgatagttcttattatttaactaaaaggaaaaacgttaataagtagtttttaaatatagtaaagaggctgagaaaaacttttgtttttcaacagcctcttactattttgcaatataataacaagataacgtgcaaaacactcacttttaattaatttcggtcactcattccaaaaatttggagaagtgagataaagaggtttacaaagtctaagtacaattgaagggcacctagaacagctaaaccatttgttgatacttcgccaccatagttgatgtagatttgcttcatcttttgtgcatcccaagctgttaaaacagtaaagataataacagcgataaaggagaagatgtaagcaatggcaggactttgtaagaacatgttgataaggtaagcaatcattaaagcaatcaaggcagccatcgcgtgagcaccaaacttacttaagtcgcgtttagtaatggtcccatacaaagccatcgtgacaaaaacggctgcggatgatacgaaagctgaggcaatgcttgctcccgaataaacaccagcaataattgcaaactcgacaccatagattattgccgtcagcatcagcataataaatgccccaactgggttccgggtagcactaaagcttacccccattgacaaagcaatcggtagcaataagataacccaaaccattccagggtgagcactaaagaaaccgaaaaccgcactccggaatacccccatggtcaagtaagcactgaatgcagaaacaagaactgccagcgtcatgtttccatacattcgggtcaagaaactattcaagccagctgcgtcagtgacaacccgacgccctggttcttgagaaaagttattcatcaaaactccctctttctatttaatttgactttatttgactaattataaaaatggtagcagaggccaccatttcgttcaagtaaatctttaattattttaacaattctttgtacttttcttcgtacttttcaacatcaccggcacccatgaaaacaactactgcattatggtattgcaaaagtttatccatggtatccatgtcaatgccttcactaccgtcaatccgttgctccaaatcagcactagaaacatttccagcattttcacgaattgaaccaaagattggggtaacaaaagtcttatctgcccggctaagcgattctgcaaagccatcgatgtaagcagccaaccgtgagtatgtgtgtggttgaaaaacagcgataacttcacgatctggatacttttgccgtgccgcatcaattgttgctttaatttcgcttggatggtgagcatagtcatcaataatggttatatccgcaatgtcagtctcgctgaaacggcgctttaccccactaaagttggctaattcctgttgaatctcatccatgttcatgtgttccatgtatgcaactgctagtactgctaagctattaagaacactgtgttcaccgtataagtggatagtgaatgtgccgagtttttggtcgcggaagtaagcatcatatgttgagccttctggtgtccgttgaatattttctgcccggaaatcatcatctggattagttccatagtagtaaaccggaacatcaacgtttaagttacgaagactaggatcatctccccaagcaaaaattgcccgttgaacctgcttaccgtacgtttcaaatgaatcacggacatctgccaaatcattgaagtaatcagggtgatcaaagtcaacgttcgtcataattgcatagtctgggtggtaggcaaggaagtgatcacggtattcatcggcttcaaaaacaaagaagcgtgcatccgcatttcctttacctaccccatcaccgatcaagtagctggttggttcaaccgctgctaatacgtgtgataacaatgcagtcgtactggtcttaccgtgtgctccggcaatcccaatactagtatgattcttaacctcattttcaacagcctcagggtagcttaaaattttaaggcctaattcatgtgctcgtttaatctctgggtgatcatcatcaaaagcgtttccttggataacaatcatccctggtttcaaattggctggatcaaatggcaaaattttaattcccgccgctaataatggcgcttgtgtaaatgtttccttttcaatatctgaacctagtacttggtgtcctttgtcatgaaggatacgtgctaaagaggccatcccggtccctttaataccaacaaagtaatatgtattttgttccatcaatccaattcctttcaacaattcaatttaaaataaatgcgaggggtagatcagtaactatgatccatccctcactaaataataaagcattataaaattttggcaatagtaatcagctgttttttgttagttttctgggtaaaacgtatcggccttagcaaaatcaaccggttcaccgacttcttgccagtcatcagggataatgaataggcccttttcatcgggagcattcttaatccgtagttcacggaaaccacagagcattccgtcactatcgacacccatcaattgaccaggccaaatgatcttaccgtctggcatcatcgcaccaggacgagcgactaccactttaataccttccgcaacattaggagatccgcacacgatttggacagtcttatcatcagcaatccgcgtttgcgttacttttaagtggtcagacttaggatggtcagtgatcttttcaacataaccaaccacaaacttaggatcttcgtcagccgttaagagcttatcaaagcccgcttcttgtaactttgcatttaatttttcaacttgggctgcatctaaaaatacttgcccgttttcacttgttaattctggtaagatcttgctggcgttcataaagttatagccaagtaatgcaccatctttttcagcggtgatctgagctacatcatcagcaatcttagtaatttggtcatccgcatctggagcggtaataacgactaaaatgtcgcctaattcattgggattgtaacttgaaattaacatcaaatattcctctctctaatataatctaccattttatattattacataaaaagaagactatgaaaatctaatttaaaactaaagaaggctgaataattcagtctctttattttcacagccttcttattttacttcaaattgtttaaaaaatcttcaacttgttgcttagttttacgatctttattgacaaatcgaccaatttctttaccattatcatatacaatgaagcttggaattccaaatacatttaattcagcagctaggtcgatgttttcatcgcgatcaacttcatagaaagtataatcactgaagtcttgttcgatctcaggcattgctggcttaatgaaacggcaatctgggcaccaatcagctgtaaagaaaaggacgaccttgccattgccaatagtttcaattaattgatcttcttttaattgtggtaatcttttcataatcctcatccctatatcattttagcaatattataccatgcttcttatctattgtaagtactctgcttgcaaggactagatatttggattttaataattaaaaatgatagaataaatgagaagttaagaacggattaaatttaaatagtgaaggaagcaatcatatgaatgcaaacaataactccctcaacccctggctgattccagtcacattaggtgcatctggaatcgccggttttatcgctggtaaactttttggtaaccgccaaatatctgctgatcggatcttaaaattagtcaaaaacgattttgcaagtgaaggttctttaaccggtagctggatcaatgataaagcaataccttttcaacgatttgcggttaaaacccatgcttatgaaggcggcgtttctcgtctagaagatggcgaagaagtagattacgagtttattgctgatgcatatactggtagtctattagaattaaaacggattgagaataactaaagtaaaggctggggacaaattttcccagcttttttaattaaaggagaactatcatgaatcttaatgacgcaattcaagaatgttggagcaaaattggcgaaggacaggtagcgacatatattcccgctttagcaaaagttgatccttattaacttggcgtttacctttttgacgtcacaaatgataaaaaattagaagcaggcgcggtactgtgccctgtcaagtttacacattaaataataaaaaaattgacgtgtacccttaaagttggaacctgtatgttcttgctttaaaattgaataaatatttttctaggcaactagattctgctcatattgaagtggagtttggttgcctagttttgtctgaatacggcgttcgttgtaaaagtgaatccattcattaattgcttggcttaattcttcttgattgcgataactggtatcaggaccaatttctgctttcagtttactaaagactgtttcacaggcagcgttgtccagacaggttgctcgatgcgacatgctttgcctaatgtttccctgacgaagtagtttgcgccaagcacgatgttgatagtgccagccttgatcagtatgtaaaattaattggtatcctgtatgaggtaactgcttaagtaattgctggagtggatctaatgcgaattgaagatttggatgttgactgattgaccaagtaagaatctggttagttgccaagtccttaataatttctaagtacacttttcgcccatcatgagcctttaattctgtaatgtcacaaaccattttctgatatttacggttactcataaaacgccgatttagcttattcttagctttcttgccatttggtcccttagaggaatcatacttacggactcgccgattatatttgatacatttaagtcccatttcatgcattaagcgctgaatgcgcttatgattaggtgtctttttaccaattaagcgatagtagtctcgaatttgagtgcttaaacggcgtacgccgtattcagcttggtagtagttaaagaggcctttaataacggctttaagttcttcttcatcctcatccggatgttcaaaccgattttgccaatactgataggttgacatggaaatgggaagtgcatcgatcaaatcctttaataagtatttagccttgaggtcataaattacttgtgcgagttcttttttggatgctttctcaaggctgtcaattttttggaggcatcgagttgtatctttaacaataagttttctctttgtaaggtttggttctgtttttggagctgaagaagcttgtcttgattcttgtcgtgtcgtttgaccatttttaggtttccttccccgacgcaatctcagtaaagcctgtggcccttgcttgttatagagacattcccactgatacactgaacctggggaacgatatccaaagtgaatacaagtttctgagattgacgccaaattttcttgtttccactttaccagatttaaccgaaaatccccagttactttgggtggattgagtaatggtcctttaccaaatcttgcataaattcccacccaaatttggaaatcatgttcagcaatcccgtatttatgcctaactgatgctaaagcaacattaccgttagcatattcttcaacagctttaagtttagttttaacgctaattttggtcatataaaatacccccagagttgatttccaactctgggggtacacgtcatcatcgtaccgttatttattgtatgctttcggactaaccttatcgccaactttaccgtatgcataatgatgaccattatcttcgcttggcaaatattctgaataatctactatctttccgttatcgtcatcatcaacaaacgttaaatcaattcttgcattctgttcggtagcagattgagaaaccttactttcttcaactggagtattttgtgtattgacgttatttttgtttaaattagtaatcgattcatactcgttatcctttaccagttcttgattctttttattattcagttgatctgtgctctcatcacttgttttatttattaattgttgttctttttgtgaattactactagtattttcggctgcgttttgttcctcattagtttgtttatcagcttgtacaacagaagtagaaaccagctgcgtaatatcggtatttgctgttgttgcttcttccatagtaggtgtgctatcagcgtgtgctactgtacctccgaccataaaagtagttcctagtaacacagacgcaacaccaacactgagttttcttaacccaaatcgttgccgttgttgctccattttgcgtacatattcttgtgcattgttcttcgacattcaatatccccccatatatttgtacgtcataacttgttatttatatttcgaaaatattcgagcacatatttatcgaaccataaacacaaaattattatttcattaatggtgggattacttttaaatacactttttcacttggtgttgctataaagaaatcgattcctcaccccagcaaaaaagtaaaaaaatactagtcagcaagcattcgtctacttactgactagtattttacttaaaattagcaattagcttatagattggttggcctttcgccgcaaatttttgttcatattccgtctcaacattatgttcattttcttcgctgtggtgcaggtctaaccagacgccatcaaagatcatcccatagttattcatgctttccaaggagaattcaaagagacccatgttatcagtcttcagttcaattaccccttgatcttggaggatctgctgataggttgctaagaaggtcttgtaggtcaggcgccgcttagcatggcgtttcttcggccatggatcagagaagttaaggtacatcttcgcaacttccccatcttcaaagtattcttgcaagtcttctccatccccacaaatcaattgcaagtttggcaagtcttcctcaagtgcttttttgagggcaattgccgcaacagtccgctgaatctctaatccgataaagttgatttctggatgagccttcgccatgccaatgataaattgacctttccccatcccaacttctaagtggaggggttgttcttttgcaaaccgtgattgccacttacccttaaattgagtggcatcatcaatcattagttctggatgggcagcaattaatggatcagcccactttttatgtttcacacgcataaattaaaatcctcatttcattagttttttgactctgacattgaagtagaaacggcttaataagaccacttccactgccgcaataataagattaattaccatctggccgacattcaactgccaaccgatactagcaagggcgatcaatagtgcctcaagcgccgttaccttggccaacagctgcttaaagtctgcctgttgctgactagcagggattggatagatgtgagtaaagacatttgattcatactggtcatagagtggcatcagttgggtcgcgatcaagtaaataaagagcacgaccaccagagtacttaaccaacctgctggcagtaagaagacaatcaccattcctagtagggtcaaccgactgacaatcccgctcacttcggtactccggacaaatgcgcgagcgtataagtaagaccatggttgaccatctttgcttagccagcggatcaagccatctgcccacttccgccgtttggtatttccttgaacacttggcacatcagtaaagaggttaaagaaacggtagacactatacatccgatcttgttccgccttaacggcaatccgccaattaacggcaagatcacgataataaacaattaccgccaagtacaagatcactgccacgacaagaccgacatagggatttaccagccacattgcgattgaagcaaggagcggatttacccagtattctagccgggtccgccactgttgatcaccccagcgcaaactcagtgatttacgagctacatgcatccaatcagccttattgacaatggtgactaaaaagatggtcacaatctcggcactgctgagtttttccgttgttaaagcgaacggcaaggcgataaaggcccccactaccgtcattatttccgctaagatcagactataccaggtcgcctggttaaggtaacgatggattccttcaacttgcggcaagagaaagactgggtccggctttttgatcagcgttgcaagacgaccaatttgagcgatgaccgtaaaccagccgatcaagatcagccgggtccaccattcatgcgatcccaaggttggcagccattgagaatagccatatgccaaagctccgaacaggaaaaataaggcgataacaaagtggtcattgaagactagccgccagtaacgcaacaggagcataaagtgttgactgcgacgcttgctaaataacttattcatcacgatcaccctttgcaagatgcaagtaaatctcatccaaggattcgccggcatgatcaccagcggctcgtaattcatcgagggttccatgtgcccggactttcccatctgccaataggacaaagcggtcacaataccgttgcgccgtatcaaggacgtgggtcgacatcaaaaccgcgacgccctccttcttcttttgctcaatcaggtctagcaaatcatgcactgccaaggggtctagcccatagaatggttcatcaatgatcagcaacttggccttagtcataaaggcacagcagatcattaccttttgcttcatccccttagaaaagttagcggggaaccagtcaagtttattatcaagccgaaaaagttttaatagttttgttgcccgctgccatgctgcatcgtgatcaagctcgtatgccataatcgttaaatcgatatgctcacggagagtcaattcatcataaagaattggcgtttcgggaacataggcgatctgctttttatactcttccgggttggcctggatagtaagaccattaattttaatcgatcctgaaaatggtcgcagcaagccaataacgtggtttagcgttgttgactttccggcaccatttagtccaatcaaaccaactaattcacctggttggacatcaaagctgacatccttcaacacaggaatctgggaatatccaccaacaagtttatttatctctaaagccattattcatcccttcttaattattgcttagtcatatctttttattatatcataggttatttcttctactaaatcatgcacgaacgcgattttttcggtatacttaggataagtttaatcttcaaaaggagcgattaatatggacaataattgtattttctgcaaaatcattaacggtgagattcctagctacacagtctatgaagatgacgttgtaaaggccttccttgatatttcacagggaactcctggtcacaccctcgtcattcctaagaagcacgttcccgatttatttgcctacgatgctgatcttgctgcccaagtattttcccgtatccccaagattgcacgggcagtcaaggcttctaacccagctatcaagggaatgaacgtggttaacaataacggtgaagtcgcttatcaatctgtcttccattcccacttccacttgattccacggtacactagcgatgatgattttaagatgatttttaaggacaattctggtaactacaacgatgaaaagtacaaagaaatccaacaatcaatcatcgatcaaatgaaagaagactagttatgcaacggctaaaagaaattcaagaggaattcaaacggctcagcagcgaagtttcacagttgaagaacagcatcgatgaactacaagctgccatccctggtgtgcaaaaatttattaacgatgttgaacgtgatgttaagaagtggaaatcgagtaggagataattgattagttcaattatcgacctctcacaccaccgtacgtacggttccgtatacggcggttcgacaacttaatcacattgaattgactggagcgtcttggacatattcataagtccgagttgttccagttttctattagttagagaatagctcaaggtcttactgtgtgcagttcgccagtagcccttgcgggtactagcgaagacatatgcatcacgctgggacagccccagcttctgtaagttagttaccttagttttaagcttcttccattgcttccagatatactgtcttattcgggccctcaaccacttgtcaaggcgttgaataaagtcagttagtttcccaattgagtagtactgaagccatccacgcatttttcgatgaatttcttcaaacattcttgtcagggatattccacgattacgtttagttaataacctcaatgctttctttactcgttgttgcgattgttttgctggacgggcgtaggctccattgtggtctacacccaacgaaaagccaagaaactttaaccgtagcgggctaccgactttggttttatctgggttcactttaactttcaatcgcttttcaagaaactgggtaatgcttcgcattactcgttctccggctcgttgacttttaacataaatgttacaatcatccgcatagcgcacaaagtggtgaccacgtctagtcaactctttatccaactcatttagatagatattcgccagtattggtgacaatggccctccttgtggggttcctttttcactcttagcgaaaagcccatggtctaagactccgctagttagaaacttacgaatgagccttagtgtccatgggtcatcaatatattgttgaagatacttaatcatcaagtcatgattaacattatcaaaataggcttttaggtctaagtcgacaactcttcgataaccttgattataaagatctactacttttgcaatagcgtcgtgagccccacggtgagggcggaagccaaaactattatcagagaaaacacgctcaaagataggtgtaagaatttgggccacagcttgttgaaccattcggtccaccactgttggtattccgagttttcttactccaccattaggcttcggaatttctacccgtttgactggtgctggtttatacttgccctcacgcaaactagcgatcaattccgtcttattttctctgagatatggcagaaggtcattgactgtcatatcgtcaatgcctgctgcccctttatttctcttaactcgcaaataagcctgattaaggttattgcggtccaagactaagtcttggatagtgacactcatacctttaccttcaccataatcggtactacgcgcccttgtgtactttcggttttccaaacctatcctcgacaagcggtcagcttgttgttctgttttctgcgattgtcgcacctgattacacctccgatataagttacaagttattgtcgttcagtccttcatctgattactcagactactatgacctcggctgacttctggcttactcaacgctacatcactgcaccgcttgtttctgtggaaattaaacttattcctcttgtcggaaacgtgtaggccagatctccccgggtaaggatattaactttcgtaccatgtcaccggtagctttactgaaagtaacttcgagtagtgttggactttaacttgtcatgcagtcttatccagttagttccagccttatagctacttcttgttcatcggtgcagtactttgccttagacttccttcagattccacctcgcagtggacacccttgtcctcagctcatggttccgactactacggcccatagcggactctcaccgcctagctaatacccatgccgggcgcacataaaaaataaggttacgaaaattttccgtagccttatttttataccctattttacttatttgagctagtactgctgctgttattgctggagctgcttgtagtggcgcttgagttaaggtagtcatcaaggatattcttaacatcgttttccttgattgaaacgttacccttcttcaagacgtttgaaacaaccttccgcatgaagttttggttgttcatgttttcttgaacgatttggttcttcaagtcattgatgtgttgactcttcttacccttagctgggtgttcgatcatgtaaattacttggtagccgtcatcagtcttaactggggtcgtagtatattcacccgtcttcaacttaaaggcagccttcttgtaagctgaatcaagttggttatcagtattatcaaaggctggaagcttaccaccgttgttcttggtttgactatcagttgacttggacttagcaagcttcttgaaagtcttgtacttgttgctggagtcatttaattggttaatgatatcttcagcatcagacttactaccaacaaggatcgtcgcagtttgaactttaggttggtacttggtccattgcttattgatttgcttgttagtaatgtgggagtaatgacgagcagccgcagtcaagagtaagtttgaccgaatttgttgcttcaatgacttttcagttaagttttgactttgaagataagcattaaagtctgaaccgtactcgttcttgtaggtattatattgcgcgttaacttgcttatcactgacttctttaccgtattgcttctccaaaaccttatctaagatcatttgttgaagcacttgcttaccagcactggtttgcttcatgctgctgtagtattcgctctcagtgattttaccgccgctagtagtagcgactgctttatttccacaggcagcaagcggcatcatcaatgcggcccctgcaatgatagcaattaactttttggatttcatgtaagaaacacatccttaaacaaaatattttttcgataacttcactcatccaatataccacacttattttttcgtgccagtctcctaaataaatgtttatatcatcttcataatttattcacggtttaatgcttgcaggtcaagaattttaacgtcaaggtccttaatccgatcatcagcagtaaaatagataacctgattcttctcagcaattttttctagcaaggccagcattcgttgccgccgaacgttatcaaaattaacaaacccatcatcaataattaccgggaagttagcttgatcactcatcacggtgacaaagccaagccggagcgcaatatacaattgttcagccgttccctgcgacaattcttccactaaaaaaacttcttgatcccttcgtatcactttgactccatcggccgttaaacggatccgggaatagcgatgagcggttaacaaggcaaaatattgttctgcctggcgaatgattgcagggtaacgatcagctgaagctcctaccagggccttattaatccactgaattgccaattggtaccttaaccattcctgtacttcatgccaaatcttagcggctaggttagcccgttcttgttccagattgctgagggttccatctttaactaaactatcaatttcgactttatctttttgaatctcttcgtgggtatgagagattgttaggttgagctgatcaagctggtaccgagtcttcgctaaagccgtcattagctcatctctatttgcgtatgcagcaagcgcttggcggtcttctgcggtcaattgttgtccataggcatctgatgccaaggcttgtgattgtgctgcagaacgatttgctaagtactgggtaaactggttatcatcgttcacccctgcttgctgataaatcgccagtttttgctgatgaattttactgtagtcttgattgagctgggctaaattgttagcaatcgttgctttttctcgggtatttgcttggatatcctggcgcgcttgttgcccttgttccagtaaatcatccaatttattcctaacagccgccaaagttagattttgcaaagctggtggcaattgttggttaaagatagcaagttggtggtcatatctttgctgatcttgtttggcagtttggagctgggcagctaattcggcatttcgttgtaaatctccctggattaatagccattgatcaagtggaaaatcctgtaagccatgtttttggccaaacgccgtgattgcttgggaatctgtcgttactggagcagaatgacttccttggcgttgataataaagatacatcactgtcgcaaaggccgcaattgctccgatagcggtaataaaagtggcattcgctaataatccaatgataaaaaggacaaagccgccgatgattccgatcattgcggcgcgagaaggatcgccatttgactggttcgtatttgcccgagaaagcggttggacattaagaaggcgggcaagttctgctttttcctgtgaggttaatggcgctggcaagggatggtggtagcgagttttaattgcagttaattcctgttgccactgattagcttgcgtttgttgacggtgctgcaaagcctcttccgcttgtaattcaactacctgctccttaagtcgttgaagttccggcatactttgtggtgaatgcttaggcgcttgtggagactgatgatcgatccttgccaagcgctgttgataaacctgttgttggcggcgaagttccttttctctcacttgtagttcttgagccatcgtaacctgctgatcagttaaataatcagcaagcggccgagtttggtggctactttgccattcatagtaaaccggccacaattgctgtaaatgtgctaatttttgcaaaagtggctgttgtttttgcaattctgcctgtgcttgccgtaattttgctttgtttgtcttcaaatctgcttgtaggtcctgataacagtgaaatttaccacgcgcttggttaattttatctgtcaaatttgcatattgatgaaggtcttgattgagcggccatttccgtccgcgcggtttatagagatggtcagcttgtttctggtactgattgatcaactggtcccactgtgcactaccaactgcccctaattgctgcagatgttgttgccattcatcccgattaagctcgtccacagctgttaggtctcgttgaccaaaactaaaaagggcttgatagagcgaccgatccattgggccaagcagttgctttagttcttgttcaccaccttgacgtccttgtgaatcagtcacactaaccttaccgccattccgcccgcgttgccgtttaatcacgtaatcatggccgttgatctcaactaataaacttccaccataattagaagtagtcttcggaatatactgggcaaaccgattctttccccgcccatccgcaaagccaaataaaatactaacaagaaaggccatcagagttgtcttcccggcttcattagggccataaattatttgggggttagctgtaaagtcaaaatcttggtcatgccatttgccaaagccatcgatacggacttcctttattttcatatgctaatcctcccgccgcaataattgagtcgctgcttgctttaattgcttaagatcaagggttgtcaacttagctgctaaatcggcatcccgtgctaaactttttgttaattctgcaatattagcaggggtaaatacttcttgggcggcttgttgccaatactgttcatctaggtcagtcattgatggcaacgaattttgctggtggagcaagagatcatagacccaccatttaccattatctgcattttgatcctgcaggtgttcaaggacatccccatttgcaagcaggtgccgaatcgttggggaaagttgttcaatgttagcaatcgtcagctctaccagttggaaaggtgcgtttttaagtttgtcatcaattgcttgcgccagggattgctccacttcaacaagactactagttgataaagcattgatagttagacttgtccattcaatttccgcaactggtttaaattggggcacaagtttattgccctgactttccaccaaataatagccgtgctgtccggcctcatttttatgccgtccctgcggattaccgctgtaaataattggcggcttctcattcaagaattggtgcttgtgaatatgaccaagtgcccaataatcataatttttagcgattaattcatcggtcgtaaacggagcatagtggttattttgactttgccggactgctccatgaagcatcccgatgtgccaggtttcgtttctttttgatggatatttttgcacttgatcttcttgaatccagcgctgatcataactaaagcctgagatagcaacactgtcatgatttgccaaagtaagagtggtggtcattacgcgattgccaaaaacatgaacatttgctggcagctctcccgtgtcttggacaatttggtaatcatggttaccataaagtagataaacggggatgtgggcttgattaagtcgttcacattgcttaatgaaaaaatcagtagcggcaatgctttgctgatcacggtcataaatatccccgctaattaaaacaaaatcaacttttaaggcaatcgcatcgtcaacaatcttttgaaaagcagtaaacgtcgatgagtggacgcgtttccataacggcttgggcatcgaagtcaaccctaaaaaaggactatcaaggtgtaaatcggctgtatgaataaatctcataatttttcctcttaacaataaaggagctgagaaaaattttgctttctcccagcccctcacttggatcgtaataaattaattattcttgtcctggcatctttggcattacttcactgtaaagatcttgaattggacttgtaattgtcttattcaattgttgaagcatgctatcaacttgccgttcttggttcatcaagtcttgaacaaccttcttgccacttacttccttggcaaggttttggatgtttttaatttcatcatcagttggttgttgaccagtcatttgcttgtgttgagcatctgcttgagcttgttggaacttcttgaaagtgtcaaaggtgtcactgtcagcctttaatgcttcaaaagccttttgtaatccttgatattcttgagtttcgcgcaattggcgactaagttcatttgcagtatcataaatatttacaaccatgtaaaagtctcctttatctcattcttagattaattgtatcatattatcctagaaaagcgatcgaacattgctccaccattgacttgccttattaccaaagttatttactgattggttgaagttatttacaaagtcgccctcatctttgaggaatgatccccatcctttagaggaaccctttgtcttttcttttgcccgtgtttgagcatcttcaaccgtgaatttggttccagcagtatttggcaaaatcgcactcatttcattcttgtaaaggtagttaatgctccgttcagaaatatcgtttagggtgtggctttggtttgtatcatcatagccttcccatgttgcaaccactacatcgggcgtataacctacgatccacttatcacgatcattggaatcatcgccttttacccctgagtttgtggtccctgttttaccggcaagcgtatatccacttggtttggccgtttcaccagttccgtgatcaaatacgccaattagcatactagtcatttctttggctgtcttaccagaaatgatccgcttattcttgctaccatcatttttggcgatcacctttccagaggcatcttcaatcttggtaatgtagtgcggtgatggcatcaacccatcattggcaaagactgcataggcacgagccatttgttgcggtgatactccgcgggtcataccaccgagggccaaggcaaggttcttatcacccttttcaactggcaaaccaaacttctttgccatatcataaccacgattgaccccgatcttatttaataaccagactgctggagcgttaagactctcataaagggccttatacatcggtaccgtcccgctataggtatcatcatagttctttggcgtgtaattattagttccatacgattgtttcttatcttgaagcgttgaatcatagaaatatccatgctctagggctggtgtatatacaacaatcggcttaatcgttgacccgggctgccgccgcatctgcgtagaacggttaaatccacggaagacatgttttccacgcccaccaacgaccgcggtaattcccccatttttcggattcatcgcaatcgaggctgattgaaccattgtgtcatcggctgagttctgcgggaagttatcgtcatcgtcataagtttgctgcattgaccgctgctgatcctgatccagggtagtataaatccgataaccgttattcataatatctttttctgaaatatgataacggctttcggcttcggcaatgaccgcatcaaaaaagtacggatacttataactatcatttggcacgtagccgttggtaatattcaacggtgtttgcttatattgatccgctgcactttgactcagcttatgattttcaaccatcagctgaagaaccatattccgtcgttgttttgtcgctgctggatgttctactgggtcgtacatccctggtgacgtcagcattccggccagggtagctgcttggggtaccgttagctgactggcgttttcattgaagtaacgcttggccgcatcttgaactccccataccccatgaccaaagtaggcattattgaggtacattgttaaaatctcatttttgctgtattggttttctacctcaaccgcaataaaaatttcccgggcctttcgggagaaggtctgttgttgagtcaaaaaggcattcttaaccagttgctgtgttaaagtactacccccaccagagatatagtcacggtgaagaagtttgtttttcactagtaagaagccagcacggcctaaccctttgactgaaaagccgtgttcatgatagaagttccggtcttcagtcgagaggaccgcgttaggaacgtttgatgaaatatcttttaattccacataagttcccttttgagcgtagaggctcccggccgattgattgctacgatcataaatcattgttggccgttgcaaccggttcttaagatttttaacatctgcagttttagcaacaaacgtcaaatggatactggtaattaagaaaattcctagaaaaataacaatgatccatcgcgttaattgataccgatgccagaactttttcagcatcgcaacaaagagctgccaatagtgtttaaaccaaactcggaacgatgcccaagtcttttttaaccactctatgattcgctctttcaaatctgaattagattgtggttcacgattcattaacaaatctccattttcatttcaaaaagctgacaattattttatcacattttggcaaatggtaagctattttctccgccagctttaccagaaattaaaagaagaggaagtgagtgggaattaaccttctcgacaaggcggtgggctaaggatagaacggtgattagcacggcacgggctgattatcgttcggacttagcctcgagccttgtggttaatttccacgatatcttaaataaagttcatataaataaagaggctgttgaaaaaacgacgtttttctcagcctctccctcttctattttcacgaataatagcaagataaagtggaactagcttcgtgtcactacaaggctattctccacacgctttttatttacatctcatctggtgccttgatatcaagtaagtcaagagcagatttgagcacatcactaactgcttgagtaagagctaaccgtgctggttgagcttcgtccttatcaagaatccgagtgtgagcgtagtattggttaaacttcttagccaattcaagagcatacttagcgattactgatggatcgtagtttaatgcagcccgcttgattgcttcgctgtattggccaaggaagctgattaattcccaagcttcagcaccggcctttgtcaagtcaacatcactaaagtcccggatgccacccttacgtaagatactctcagcacgagcacgagcatattgaacataaggaccagtttcaccttcaaacttaacaacatcttcaagcttgaagttaacagcattccgacggtagttctttaaatcgtggaagataacggcaccaacaccgacttctttagcaacttcatcagcgttttcaaggtcagggttcttttcggcaatttgcttccgtgctaaatcaatagaatcattcaatacgtcttcaagggaaacaacattacccttccgcgtagacatcttcttaccgtttaagttcattaaaccaaaggagatgtgttcaatttgatcccaccagttgaagcccatttcctttaaggccgcacgtaattgcttaaagtaagtttcttgttcggcaccgacaacgtaaagggacttagcatgaccatacatccgcttccggaaaagtgcagttgccaaatcacgagtgatgtaagttgtcgttccattactcttgatgatgagtaatggtggtaagttatattcatcaaggtcaacaatttctgcacctcgactaggcttcaataagttcttatcccgtaacaattggataggttcttccatcttttgagcagagaaagcttccccattgaatgagtcgaagttaacatctagcatcttgtaaacacgttggaaccgttcaagagaaacttcacggaaccagtgccaaagccgccatgcttcttcgtcaccatgttcgagcttagcaaaccagttacgacctgcttcagtgtattctggatgttcgtcagcttcattattgatccgcacatagtacttaagcaaagtattaattggatccttcttaacttccgcttcgtctccccacatctcataagcagccattaacttaccaaattgagtaccccaatcaccaaggtaatcaatccgaattaagttgtagttaactttttcaagaatccgggcaacagcttcaccaatcatggttgaacgaaggtgacccattcccataggcttagcaatgtttggtgatgaataatcaatcgtaacatttgattggtgaccaagatcaatctcaccataatgttcaggatccgctaagatagtttgcaaaatcttagcaccaacttgggctttgtcgaggaagaagttgatatatggaccagcaacaactaccttttcaaaaccgttttggtcaaccttttcaaccaactcacttgcaatcatttgcggtgccttatgtaaggtcttagctaagaagaatgtcgggaaagcataatccccattactagaatcctttggccgttcaatcttagcttcaatttctttaacatccatctctggcaatgcttgtgccaatgcagctgcaacttgttgcttatcgctcatatatattcctccttatacttataaaaaaacgcccctaataagcataatgcttactagagacgagatttacccgcggtaccactctaattgaattagaattccactcattcattgatttaattgaaatatctgaggcacgccttcacaaatcgaaaagcccctaactctcatcaacaaagggtcgctgtagatttcaaagtgctactactcctcaaatcctattttcacactcaattattataacaaatttagatttaaaaacaaggactaatctacaagggtgagttattacttttttcttacttattatatgttacaattattatcattaaataataatgaaaggttgatgagttatttatgacaaaccctacaattcaagctgtcacaattgcaggtcatgattcggacgggagtgctggaatgcccgctgaccttcatgccttttttgcggatggcgtatatggtcacggtattttaactgccgctgtttccggaaattcttacgggatcacctcttcccaagtaatgccgcaagaatttattgccgaacagtttaaggtattaagtgaagattttgacatcaaagcatccaaaactggaatgcttgctaatgacgatgtaattaatgtcgttgctgataactattcgcctgaacattttggcccgttagttgttgaccctgtgattattactaagcacggtgcaatgttgcttgaacaatccgcctatgaactatttcgtgaacgaattattccccttgcaactgttattactcctaatttctatgaagcacaaaaattaacaggaattgaaatgaccacagatgaagaacgggttaaagcagctcattatcttcaagacttaggggcaaaaaatgtggtgattaagggcgcgcataatgatgatagccaaacaactgttgatgactttgttcttcttgaagacggtgatagcttctggctcaaaaaaccttttgttaagactgatcggttgaatggaaccggggatagtttctccgcgatcattgctgccgagcttgcgaagggaaataatgttaaaatagcagtaacaaaggctaaagatgccgtttacgcagcaatcgcaaatccattaacggttggtcataaatttggcccaatcaatcattgggatgcgcaaaaggagctgcattaggaggaatttttgatgcttgatacgtataggcacaaagttgtattaataggtgacggggctgtcggctcatcatttgcattttcattattgcagtcaacaaatgaggtcgatgaattggtactggtggatcgtacaaggtcaaaagcagttggggatgcggctgatcttgctgatattacacccctgacaaacccagtaaagatttatgcgggaacctatgaagatgccgctgatgctgacgtggttgttattacagcggggattccccgtaaacctggtgaaacacgtttagacctagttaataaaaacactacgattcttaagtcaattattgaaccgattgtcaaaagtggattcactggtgttttcgttatctcaagcaatcctgttgatatccttacaacaattgcgcagcgaatcagcggttttcctaaagaacgggttatcgggaccggaacttctcttgattcaatgcggctacgggtcctcttaagcaagaaattacacctatccgtcaatgtcatcgatgccttaatgcttggcgaacatggtgatacttcttttgcggcctttaatgaaatcacaatcggtggaaaggccctcaatacaattactgccctttcaaatattgataaaagtgaaattgaaaaaacagttcacgaagctggcagtcaaataattgccaataaaggggctactttctacggaattgctaaatgcctctcgtatattacacgggcaatcatcgaaaaccggaaccttgtcctaccgatttcggctccgcttgatggacagtacggaattaagggcctgtacttaggaacgcctgccatcattaataatcaaggaatcggccaggtcgttgaatatccgttaacatcagatgaagttaaaaagatgcaacagtctgctgaagcaatgcatcaagttttagctaagattgagatctaaaaaagctgaagctaggagaaaactttctcttagcctcagcttttttataagagcgggtaacgagaatcgaactcgcgacgcaaccttgggaaggttgagttttaccactaaactatacccgcattaactaactaagttcaacacttagttagtatatacctcttctaattatttgtcatctttttttaagatttttttgaagatttagcatcttctactatttcttcgtcatccttttcttcttcacgaggaacagcctttaccatcttagcttctttttggcgaataacagcgcggccatttaattcgttaaccccgcttttatcagacggatcaaaatcttggatggataccataattgaattagtataaaccttttcaacaacaccagaaaattcatgttcgaggggaccgaatttctttccttttacaatatcgccaatttcaaaatctgccacttgatttcacctcaaatattatttatttttacgcaagcaatatacgtaccatacactttttttattatattttcaagtcaaaagcatatagtgtatctgtcaagttttcataggtagcctttaaatatacagttttagtgggttagtgccttaaaaagttgtcccattggtctacttgtggccgtgttaatcggaattattccttgtactgctccaattgacggctttgtcggtgcctttcttagaaactctccagttcgaatatgcatttcctgtaataggctggtttgagccactcgaggaagaactgttaattgttctaggattgtatttaaactagcttgcagttcaccattcattcgggcttcaattaaaccaatcatggctttagccccctgcttagtccatgacttgccctgtttcttcatccggtaagtaaaagcccggtgagaactttcgactgaaccaattaaatgaatatccttaaatccacgcatttgtggtgagaggatataccgccaatttcgctgtagatactttcttaaacgcattaggtcgtctgcttgtttttccgttaggttttgtgattcataagtatctaaaattattgttagctctgcttgatcatgatgacgaacggctttaattgctcgcatggctaactcgttgtgccggcctaaagtatgttcaattttctgtaaacaatgatagcggtcgagaaagtattcaccatgtgcaccttgaggaactagacttaatagcttagctggttcgtaacctgggccagcgtcactggccaaaaagatcgtttgaccggcaagcttataatggcggtctaaataatcacttagtcgtgcttcaagccgtccttggtgcccaacactgagaaagtcatgccgattaatgatttgattagctactcgctcataaacccgataatggtgcacaagagtcagctgacctgcttcttttttacctttaatcataaaggcatcaccctcaatagttaaatttttaggcatatggcgaggagtagcttggtgttcttttgcttgagtttgtttagctacctgatttcctaactcatgcacggcgtgcattaccgaatcggcagtaattccgctgtcaaatacaaggttcaaaatgtcggcagtattgcgcattgtagttgtttgggcaatcttagccatcatcattaagtattgtggcgataaacgacgacgtggtttaatttttaattgttggtctaagtaaaattcacgtttctttgtcccagcctgataataccgtcgttgaaaagtcaccgggccaaagataaaattaagcgtccgtggctgtttattaattacttgatagttcgctggagcttgggactttaagcttcgatctaagctttccaaaaagttttgcatgattacttgtcctaactccaataccccttttaaaataatctgttcagcttcaaataaactgcctgatttcaccaaattctgctcgatttctgttaaaatatccatgaggaaagacctgcctttgcttagtattcgacacactaaaggctactggtcttttctttttttgtaaataagtaaattggtctacaaaaaagatttccacgaccagatgaattattcatccaacctatgaaaatcttacactaacgcatatagtcagtttctctcatcaatgctaaaatcaaagccgaaaggagtttacccatatgttaaaaataatagtggcggtcttaatcattattttgattctcatcactaccactggtctgcatgcaaaaattgaacggaaagtgactaactggcttgaactaagccgtttattctttttccttttattgaccgcttcgattgtccatacctttcttcatttcaagactcagcttctgagcaacctagtatggatcatctttttaattctaatctatatcttaatggaaactgctttccgccttaaacgggaaacatttggcaatccctatctaacagccttactttttattgcccttattattgccttggggattggctgctggtggatctaaaccaataactgttttcaatagtgtcaatcattttcactaactgactagtttcctcaacatcatgaactcgtaaaacacgaccgcctcgcaaatacattgctgtctcagcaatcaatgttacgccgagacggtcttcttttgctagattaaataatttttgaccaaaaccttttcgggagatcgcaaccataatcgggcgctggaggtaattaaggtggtcaatgtttcgcatcgtcgcataatcctggtaaccgtcagcaacctttgcatacccaattccttgatctaaaatcactcgttcaagatcaatgccagcagccgctattgtcccaagattgtgttcaaagaatttctgcatcgctacggtaaggttatcatagtcatgggttcggctgctatgcatcgttaccattccaacatttgccttagccatcaaaattagtttttgttttgaattaaatgcctgcacatcattgataatatctactccggccttaattgccgctgccattactgggagtttatacgtatcaactgcgatcgcaatctggggatagttttcgcgaagaagctgaatagccggcataattcgcgcaatttcttcttccggatcaacctctttaaagccacccggtttcgtagtttgcccaccgacttcaattacgtttgccccagctgccaccatcttagcaatttgactagcaatagcggaatgggattgaaatttacccccatcataaaatgagtcaggagttacatttaaaattccataaatcaccggttgctctgtcagatcaaaagtaaaccggcctgcacgccaaataatctggtgacgacggtaaacctgttcaagagaagcaattaattcttggtcgttctcccaccgctctttcacccgtgctattagttcttttagggaaaggagcgggaaagaaaattctacgcgcttttcaacacaagcgacaggggtatcaaaatgacggataaatcgctctaccattccagccgtctccacatctggacactcccacgtcaataaaagctgctgatggcgattaacttggtcggctaagatcgcggacactaacttcgaatagtctttagtaactaaattttcagtaactttcatttcattctcctaattgatctaataaatttttaacagctcgtgcacgatgtaaataagaaatgcgggtcggctggtccatttcggcgagcgtttgtgattcaccagctggaataaaaatccgatcaaaccccgtcgcattgactccgcgttcggcatgagcaattgtcccctttaattgaccatgaccaattttaaccacttgattatttatcgccagggcaattgttgttttcattataaattgtcgggatttaccatcaactaaatggatcaagtaatcatttaaatcaccattaggaacttcttgtgccaattcccgcgctgtctgcaccccgtaccttccaggaaaagccgggagttctaagccagaatcatcggtaattatttttgctgccggtagttgttgactgataaagaggacctttgcctttgcgttttcttcatagctcactattgattcaggaggaaaggtttgttgcggtaacttttttcgatacccctcaccgtgttggtggtaaaaatttagaatggtttcaatttctttaattttatgaatattatgggttgcaataataaaattatttttcatctaaactggcctcgatatctttaatcgtataaaaagaacccgttacaataattaaatcattcggctccgcaatcttttttgccaccactaacccttttcggggattatcggcaataatcgcttgaggcagagctgatttcaactcacttacatcaagggcgcgagttggatggtcaggagtagtaattattatcttatctgccatttgctgataaattttaaccatctgactaatatttttatcagcaagaaaaccaagaaccataattactttattacggggaaacttagagatagtttcggtaagttgtttggctgcatctggattatgagccccgtccaaaataatagaaggatgatcagcgattttctgcattcgaccagcaatcttcactgtcgcaagcgttgatagtaaaggctgccaagaagtaaccagtcttcgttgaaaaagaaaattaaatacactgacaacggtgcccaaattttcactttgaaatgtccctaataaattaaaaggaactttataaattttatgattaactttcaggattgcctttccatcaacaattgactgggcatctgcttgcgttaatcccactctttgctgatgagcctttgccttaataattgtgagagtgtctttttcttggtgcggcgctaaaaacacttgcttagtcccattcttgataatccctgctttagcttgggcaatttgggtaatcgttgggcctaagatccgcgtatggtcaagggcaacatgtgttatcacactaataaaaggcgcattgataatattggttgcatcatcttgaccgcctaaaccgcattcaatgactgcccaatccactttttgatccgcaaaatattgcagcattattaaggtccaccactcaaaaatggtaatatcatcaggcgaaagatcaattggtaagcgttcggtgatcttttggtaagtcatcgcaaaatcttttttactaatcaaatggtcattaaccttaatttgctcccgatcatctaccaaagcaggactgctaaaataaccgacccgatatccagcattttgcaaaccctgttctaacattgtcccagtcgagccttttccgtttgtccccgcaatatggataatcttaaatcgctggtcaggattttttaaacgagtaagaattcgtcgtaaaaattttacccgatcctgttgtcctcccaacatttggcggttaaagcccgcgttaatttgttcataggtctgcacgataattcctcgtttgatttagaaattcttgtttcaaatcactgtcagtcttaaattgacctgtaaacttatcagtatacgtaaattgaccggccttattaacacctcgcatttccatacaaaggtggcgggccgcaatggttactgcaatcccggctggatcaaggattcgttgcaactcggctactaaatctgttgtaacgcgttcttgcatccccggttttttcgttacaaaatctaacaaccgggggatcttacttaggccaataactttcttatctttaggaacataagccacattcgcgtatccgaagaatggcagcaaatggtgttcacacattgaataaaaaggaatgtgctgcactaataccatttctggcacatcatcaacatgaaagaccttatagttcgccacttcttctggttgatggttaagagaagaaaaaacttcttggtacattttggcaacgcgctggggtgtctctgccaatccttctcgttccggatcttcaccgattgcaattaataaatctttaacagcctttgctattttttgttggtccatgaaaatacctctcgtccatatatctttttaagccaattatggtctggagtcttatttaataaatgatccaattgttgataataaggatcattttgattagtaatttcgcgcattggtaataaaacaaactgccggttagccatttctggatgaggaattgttaacgttgaggttttaatatgttgatgaccaaaatcaataatatcaaggtcaattgtccgtggtccccaatgaatgagccggcgtcgatgtaactcctgttcgatattgtgaagatggtcaaggagttgctgagctgttaacccagttgcaactttaaccgcaatattgtaaaaagaatcttgtttgacacctcccaccggttctgtttcatacactgaggagatcgccgtaatatcaattttaggcggcacattcagcatctgaatagctttttgaaggtttgctaaccggttgcccatattactgccaatgcttaggtaaacttcagtcataattacttgctccctgctacttcaatttcgacattatcaaaaattccggcaattggcacactatacttacgaatacgaaggcgaataccattaagcattgggtatgttttgaaaagctcatgcaataaattattagcaaggctctcaatcaaattgtaattatggtgggcaacaaactccgcaattgtttcataaacatcagcgtaactgacagtttcctctaattcatcggttttaaccatcgtttcaattgggtagtccatttcacagtcaatttcaattttttgaccaagctttttctcttccgcaaacacaccattgtaagtattaaatgccatgttgttaattctaatctttccgataagctattgccccttcattttttattttctatcataacgcataagttagttggtgaaaatatcttaatagattaagggcgcaatcttttcctggtaccattgttccccagcttttgagaaaggattagtaaacggcgcaggtttaatcaagcggtcatcgacgttaaacaattttaactgtcccttaacttttaatggttcaatccaataagaaccaccttcctcaaagggtgcaatcacccatgcataatatttttgttcaccgtcatatcgttcctcaattccagtaatcttagcaacacataacgcatgactagctaccgccccatgtgtcttctttgcactattgcaaattaggaggtcaccacgatatttagttgtccatgtccggtattcctctgtttttgtgtcatttaagatttccattccatattcgggatgaattgataaaactttcattttggtcttcctttgcagttttatttcaatataaagaaaaaagcccagcaaatcaatgtttaccgagctatgatgatgcctcaggcaggaatattaaacattgatataacgggctttgagctttattttgtcgtgagtttgtcgtgaactctataattcagccagtttatcaatgattagcgtgtcatttttagccttgtactcatccaccagataagaataagtatttaaggttacagtgatgtttgaatgtcctagccgtttactgatggcgtatatatcgacaccttgacttaacaaataggcaacatgaacatggcgcaaggaatgaaagtgaaacccttgcttttcgatgccacagtcattcataatagagcgcaaacacttattcaatgcgttacttgttgggattgtccctaacacgttttgaaacaccataatactattattagctttcaattcagctaaacgatttaacagttgacggttaaccttaatcgttcgcttgctagattctgttttagttggtttgaaagtttttttcttttcgtcccacgacttagaaatactaattgttgaatgtaaaaaatctatatcattccacgtaagcgcctgtatctcactcttgcgcattccagtataaattgccgtgagtatcatgtaacggcttgtattatagtgattgagcttcttgttgacctcattttttagtgtcactaactcatcatgactaaggtattcaactttgcgctctcgctctttattagctaccaccttgacgttatgcgtgaagtctttgctgataatatcatcatcaatcgcatagccaacacatgaacggatagcattattgagcttgtttacgctgtccctagcatgattagcaccgtaccagttaataaaggcttgataatcagagcgcttgatgtcccgtagtcgtgtatctttccagtagctttcaatggctttccgtataaccttataacggtttttcgtaacatcagtaataccattttcctcatagagttcataccaccgccaataatacttagctagtgtcatatcttttaaatcaaggttcacttggtctaactctgcttctagtttattggcttcttgcagtgcttcacgctttaaattaaaacagccggctgatttctgatgccacttcccctcgttatcttggtagcttgcataaccgtagtatccttttttcgcttttcttacataactcataaaattacctctttcaatcgcacagcttgccaacgtggatattggaggtatgtatttgagttttcgtggcgcaattttgcgctgtcaaaaggggatgtactgagccaagttttcggctgagtgatattcactccgcaattttgccgggctcaattttgagccgagtaaagacgcacgcaattatgtgcagatgtacttaccccaaaattgaggtgagtaagatgtgtccgattttggacggatgtaatcagccgagttttcgaccgattgaacattggcttaattcttagcagatgtccccaaaactggggaaatatagcagtggtgctattagtggtgataacagtggcgctattagtgtgtatattggtttcgcagtatagaaccttacaaaacctaacattaaacggctatatattagctatatcagcaataaatcagcagaaagaagccaagcacagcaagggtttcaacgtaaaaagtgcagaaaaacagcagattaattactacaaaatatcacatcgaacaatgacactacctctgaaaacctctgataaattagctctatttagcctaaggaagtacgatacataaaacttcaacaacgatatttgatatgcaatcaaatgcgttaataataaagttttttatagtgtctctcctagtagcttttaactataaataccatgaagggtcatgatagttagggtcaacattatcaattcgactttctaaatctactagtttgtcttctgtactttctaggacgatagcaaaggcttcaaataattgttctcttatcttatcgtttttatctttatcatcggtaaaattaattttattaataattctgcctatactttcataaggatcagttctttcgtggctcaatcctttgatatagtctgtactaacatcaaagaaaacagcgagttttctccaaatttcatcgttaggatttcttttttcgttttcgtattggcttaacgtattatctcgcataccaactttctcgcctagctctttaagagttaggtttttttcttttctcaattctttgattctattgtgatgtttatagcgatgataggaatattcactcatatattatcaccttctttacttgattaaataatatcattatttcacataactgtgaacatttttattgacattcacagttatgtgaattaatatttactcacagttgtgtgaatagaggtgatattaaatgccaatgtttctaacagataagcaagtaatagctatcaaacgcaaacgtggtgaacttaatttatctactgtagcacttgggcgtgaactcggtttaagtcgatggacgctagacaatatctttaagcgtaaccatcgcaaggtaacgccagcaacttataagaagttgagtgattggcttattgacgagtacgccacagcagatattaaagacagcaccgcagtagcaacacaagacaagtagaggtgacaaggaatgacagaagttaaacgaaatatgaaagtagctccacaagaagaacgtgagacgattatttcttacgagtgtttaacagggatatggcacatttacacgaacgaacccaaacatgctaggaagtacgagaaatatgtaactcatccccagcgcaaagggtacaactcaacaggtcgattaatcatgctagagggtgatgtagacaacgggaaagttactattcggaaaaaatcaccgttaacaaaggcacaaaaaaatcacttgcaagaattaaataaaacgccagcatttttgagtaacgtacatacagatgtacaaagccagacatcaactaattaattcgataaattatccacatcaataaaagaattctcaaaaacgcaagacaaataaggggatgttttgaatgaataatctagttttcatgcacggcttgaatgaagagccgtataccacagataagatcatttcagaatgcagtaataatcaattggataatgttaagcacctaatccgtaatcataaaagagactttgaagagttcggagttttgggatttgaaatccgtaaattaaatggacgtggacgaccacaaaagacctaccaccttaacgaacaacaagccacgctcttaattacctacctagataacacaccagaggtaaatcaattcaagaaaaaccttgttcatgagttctaccgtatgagaaaagagcttaatcaacgacagatcaaccgagctattgaaaagccacagcgtaagtctttgatggacgctgtcaaggattggccacacgttactcaatggagttatcgcaatatgacacagcttttattaaagcgtgctactggtctaacagcacagcaaattaagaaacagcgacacgtcaaagttgcgttagatggtctaacactcaaagagcaagaacggtatcagcaattagagaatatcgctattggccttgttggcctcaataagacgtgggacgaagtaaaaggcgttttgctattagcttaatgattggagttgagaacatggaaagtttacaagtgcagttgccaaatgatttacaggaagcaaccaaagcaatgattggggatgcactcaataaagcgattaaggatgtgcaaaataaaaatagcttcccaccttatctgaataagggcgaagctagtgcctattgtggtgtatcacggggtgtcttcaatgcttggcttaaaaagtatgacatccccacaattaagattgagggcgttagtcgtttcagacgtaaagccctagatgagtttttgatccagcacgaaaaataaataatatcagcttgccagcgtggatattggaggatttattatcatgaagcttttaataactattgataaacacatattaagctactgggacacagcaccaagtgaaagagtttgggcttaccttgttaccttgcctgttgtactcgtagcaatgaatttactcgctcagttaatcaagtaaaggaatgaagccgatgaaacaactagacaaagaagagcaacaactattggacttgttgcctaaagggattgaacgccctcgaccactcaaagaattagtgaaacttactggatggagcaatcgcagagttagaggaattattaatcgcttaatcgtaattcaccatcagccaattggtgctaagtatgaacatcctaacaacggatatttcatcatcaccaatgacaaagaacgacaacaagccttagctcccctcacctcacaaataacaatgatgagtaagcgagcgcaggcaatcagtaacgcagatttagaaagtgaagaataatgtttcgacaaaataaaaaagccgtcaaatgctactcaccgaccaaagtagttagcatttaacagcaacaaaagaataagcgcaacggataaagcccgttgcttgcttattctaacatatttcagtatttaaaacggggaatatccccaacaaatggaggaataatcaatcatgaagaaatttaatatcgaccaagtagaggacactaacgttactttagatactgttaaaggactagcacaaacaataaacgaccttttagaggacaatgtttccttattcactgaatatccaagtacacataagggcgtgaagtggcaagctgatcgtttagtaaccaaactactagcattagcaaaagcaacaattacagcaacgacaaacgctcaaaatcaaattaaaaccgttgctgaagacttttataaaggtggtaacaagtaatgactgaaaaaatagatgagcttatagcagaccacgaaaccatgagcggattaatttcatccctaattgattatcacgaaaggctcaatgattatttagctccatgcttaaaggatgattacacccacaatgatttaactagcctagtcttaacggtcaattatcagcaagatattatcagcgctttacatgagtgcttagagcgcctaaatgataatgatttagaagcattgcaacaattagcaactcttgaactcaaaggcggtgatacagaatgcaactagttactcttacagcaccagacggacaccgtgaacgttgggacatgaaaactacttacctcgccctgctctcgtggtattcatatcttaaaaacaccgagaacagcaaagaaccaacggaactcgctacccgtattagtaagttcgttgggaatgatattaagcaagttcacaccttcttagtttacttagacggcttcaatggtgacttatattctaagttgtccttgctaacgaacaacgatgataaaaacaccactcgcctttatttcatcatgaagtcaattaacaatccaaattacttagcgcacaacaaaaagaaagagcgagaacgccaaaagattgttgaacgcattgaacaagtcacaaataacgatgttgaaatgcttaaacgccttatcgctttaacaaagctatttgttgatggtcaattaagctataagaatatggagggatgagtaatgaaattgcttcaagcaactaatcaagatggaaatttgatattaaatgactttgcgacaggaaatgaaattagcaagcggatatattggcgtgatagtaccccttattatctaagtaaagatgatgacttgctaattccttttaaggctatccgtgtaactaatgtttaccaagaggaggatcaaagtaatggcacaaagaagaatgattagtaagtcaatacaccaagacggacgctttttgactttatcgcctgtaagtaaaattctttacgatgatttagtgctatatgctgatgatgatggcttttgttctgatgtttctttaattaatttgatggataaagcaaccgctgaaaactatagcgaattagaacatgcgggtcttattgttaatgttgagggagtttacttgattgttgactggctaaatactcaattattaaatcactattctagaacttcttttctcgatttatccagtaaggtatttatcagaattgattttaaatacacaataaacgcagaagatagaaatattgccttgccattagatgattgggtagagagaaaaaatcgcaacagacagataaatcttaaagccttgcaacaacagcgtttgaaaggtgtggtaacccaaaaggtaacgaacggtaaatctaacgtaaacaaaaagattactaaagggtcacctagtatagataagaatagtatagataagagtagactagaacagtacagtacagctcagaacagcaaagaaaagatcaataaagaaaataactacaagtatataaatagttcttctaatgggggtatgggggaaattcttcttaacgacgacagctctacttcctctatagagaataatgctactacagagaatggaggaaacagtgcagtagatagtggagccaaccaagataacattaacagtctattcaactacttaaacggtatatcaactactgatatccccaaagataataaaagacttgctgatgtttttgatatgttaatccataatggctatgaaattgaggacatccaattaggaattgataacattatgaacgttgctaatcaaatgccacaatatcaaaacgaacaatcattagccaagctattaatacagcacctacccgagtacaccaagcaaacattggaacgatcctctagtaatgattaagacgcagaggtgatacattcatgaacctaacagaatttgagaaaagcctttctaacttttgcactggatatgaaacctatactaaattgatgagtgacattaaacgattagacaacctaatccaagccaacgaaaagcaattaaacgatagcttaatcaagataccatttacccacttgtattttgttgatggtctaggtattttcaaacatcaaacgcctaccctactcaaacaaaacaggcacttaataattaaatacaatcgaaagctaataaaagccaagaaactttctagttcgcttcaaaagcaattaaagaccattagaagcgattatctaagaagcaatggtgaggaaagcaaagcaaaagataaattagctaataaatatttgaagcagtttgggcagattaggcacccttaaaagtaatgacagattagtcggactataaaaagaggtaattactatgaaccgtgaagaaattgaagatcatctgtctagcgttgtactggggcttgatactaacaacatcaagctgacccagattaaggaactagacaaacaaattgcagagaatgaagcacaattgaataagagcctaatcaaaataccgttcgcccataaaaagatactggacgacatgggtataattaaacaccatgttcctaccctgctagagcaaaataagcagcttgttaccaagtacaataaaaagctcaaagaggcgcaacaactcgaggggcagatagttaatcaccttaaagccgttattgatgattactcacatagtacaggcaagaatagggaaactaagaagaagttaattgatagctatttcagtaactactcaattaatgaaaaattggacgaatgcgatcaactagagcgatgaaaataaacatcccccaattactgttatatcaacgataatcgggggatgatttaatttattcggcggaaaaggaaacaaaaagcgtgcaatgctttactagcccaaatgctgatatatcaatagctcaactgtaatttttcgttatcaattggacggaaaagctaaagatattggattggcggagaggttatgcttaaacacccgtttattttccagagatccacatcgtgaccgtcgctatttatcgttaattactttttagggtaaatcatcatcttttagttaaaacttcttaaaacgccttacagtacacgagaatattatctaaaatttggtggcttaaaattcagctatcaaaaattgacagcctaaaatctgaccgccaaaatatcactcgtaggatcatagcaataaacatactaatcagatttagaatagtgtttatttttaatttaaaggcggttttaaaagcgataattagttttaaatataatttatcatttgcaagttaaaacggctcagacggctttaaaactaaaattagcatatatagaaaaatggagttgatttaaatgttcgctgtatcgtgtctgttaattggagcaattgcatgtagtttggcaagcctttttgctgatattgcggttatatggctattcacccactacatgaaagaccagtacaaaggggatgattataaatgagttggtatcgtgggcattatgtatttagtaagcgatccttagcacagtggatggctgaaagtgagaaagattatcattttagagttaagaacaaagataaagcagacccaaccgtcgttaattttgtattttctgagaacgtcaataaagacaggcgtttatataccgcttgccgtacggcttacaattgctatttagattattgccaacaacaatccataactccattaagtaatcgccaatttaagcaaaacatggaattgttgggctttgtttatcaaaagcaccatcgcttttatgttggctattacggtaacaaggtaacaaccgcatataaaaacattggaattgtgaaacagtaaatgttccatgtaatgtgcaatttatcaattcatctaaaaggttgatataacagcaatcttaattaaaaaccattgccaaaaattgcacattttcggggatgtttgtagttaaaacaatatcggaaaaacttatactcgttagctaattcgtagttaattgttattgcttatgagtgattagctgtaatcgttgatataatcacatttaacgtcaaaactgaaagcaagaaagagcaatattcgcccctcttttgctatcaaaatagaccatactaaaaaagcccccgttctcttttaacgggggttggtttattgatactttgggaacgcacatcgacttttttgtgcaacaaattccaataaaaaaagacgctctactgtgagagcgccccttagatacaaacttaaagcaattcattatatcacatgattttatttaccctaaaaagggtatgaatttattctatcagttagcattcaatattagaagttcccctattgttgaatatgcttatgatagttatatataatataagcatgataagtaataggagtaattaacctagcacttatcaaggcggaaaagaagctagacaccaaccagccttttacaagcacagcaagaaacggaagtgttggttatgtgtttgtttcttgactgctagggaggttctggcggtgagcataacattaacatttacaagctataaaatgcttgtatttgtagttgttattgcaatcagcctactaaaaaagcattaatagctactaactactaatgctttgaagtaaacctgtctagcaagaaaacgtcgggcgttaggttctagcacaacctagcgcctttttacataaacaattataacatgtgcatataactatacaagatataactttacgctataagacactatattacactatatgcaatttaaggggatgttttcatggttacacttgcacaggcagaagctactaaacgatacaagaaacgacacccagagaaaaacaaactatatcaatatcgttcaaatgctaaaacgtttattaaacactatgcagataaagacgacctagacaaattaatatcactagcacaagagcaaaaagccaagcgattaagtgacgagggcgcaaaattgcgcttacccgtaaaaaaacaagttaactaactaaaggacgacctagacacctagaccgcccttttattttgcaccactcaataatctaatattatcactttggatatactgaatgttaaccaatgctaacctcaaaaaatcgcttaacccagtttaaaaatgatggcaaatgatggcacgatggtaggaaatggtaggataaaaaaagagtagccctcacaagctacccttgatattgtcgaaaaattaacaactttacttttcacgccccataggtattttagcatattatcttgagtataatttagtgcgcaccctcattaaaaagtatgcgtactttccaaaaaagtgtgcatacaaaaacgagaaaggttgcaccctattttgatagcccttgaaagcctctagctttactgttaaaacctagtaaatcctaggattttattagtgttaaaatgctcagaaatgctaggaaatgctaggaatttataaaagcatgatgctagcaaatgctaacattttctactagcagatgttgggaaatgttggagttaaattgcgcttaaaagtaaataaaaagcctagcaaaataaagattagattaaagctcaaaatctttatatcgctagacttaaaacttgaaatcaagtggtgattaatcaccgccctaagagttgcaagttggtagctcaactcttaggggcttttcatatgtatattatagcgtttaaaagcgttaaattgcgttaaaaaaggcgctctgctgtgagagcgcccttgagatataaataaaaccaaaaataattatatcatcccccgcccctatctttgaacaaaaaagagcgcacacatttcaatcgtcttgcgtgcaaacgataatttttaaaattttagggtagaggggctgtccttccctagcctttgatatatcaacaatcataaaaattaaattatctaaaacatcccctttttagcaattaatcagagacactttatcaataattccgacaattcagacaccctaaaaggaaaatggctgaattttccgcagatatttccacaagcaaaataaaaaaccacctaaaaacaggtggctcacgttggcaagaagatatattattttgtcgtgaaattgtcgtggatttgattaaaaatagtgttctatagtgtaaacctaaaattaaaaatgctgatatatcaacgatttagacactatcgaaaagtatttaaaatacaaaaaatgcctcaggcaggattcgaacctgtacatggataaccatacaacgacctgaacgttgcgcgtctgccagttccgccactgaggcactaactattttgtaacattattaagtataccgaactcatcaaaaattacaagtatttttatttacaatcctcaatttgcccttatttaacaaattgaatcattgttccatatgcggttaggaccaagaatttgggtgcaacctgcatattggcaacatccgtagtaaaacgaaccccaacaacaccatctgcacctttttcactggcccgccgctttaatttttcttgaacatcactaaataattggtccatggactcaaatgaatcaattgcttcggtaggcatcgctaaatgactggtggcattgacaatccctaaaatgcggtgggcttgaggaaatccctcagttgataaaaacatctattatcctccggtactgtaccctgtcaagtttacacactaaataataaaaattaattggctttgccgtaacgaaattccgttgcagtaaggtcatttcttttagctgaaataaatgtatttgtaaagtattcaattccttcagccactagtgtttgaagttcatcaagtgtttgtggcttagatgaatgcgctagccaaattgctttaaagtcggcccaccagtgctcgataactgcgttatctgctggtgtgccaggagctgaatagctatgttgactattattgctagttaaatattgattgaacgccttagaagtataagcagctccgcgatcagtatgaataagtggggctaatacaccttcttgtttctgagctttcttgaatacttgaattgctccctcactagtttctgttggggtaattagccagctaattggaaattgaccatataaatcaagaaccacatgtaaacgaactttataattatgaatattgtaggcgagttctgttgtatcagttacccaaacctgattagctgcttcctgtttaaattgacgattaagtatattttcagcttgataggtttgacgttccttgtcgcgttttcttttagcttgacgatagtcagctttaatctcatgttccttcataattctaataactcgttttttgttgaccaaatatccaagacctgcgcgcttaataagacgagtcattttcccatagccaatactttgcttattagttttctcaatttctttaatcaaattaaggatctcttgatcctggatatccttagtagttaattctcgttttagccacttatagtaggcttgccggcttactttagccgctttaactagttctgatactgtataaccgtctttaatcatttcttgaatcgcttgatatcgtccggtcgatgcacctcccgattgcgtatttcgactaatttttttgcgaacgcaatttgtacctccctttctcgtttctcagcttctaattcacgtactcgttttctcaaccgttcgagctcatttgtcggttctttatctttatttctgccacgattatcttttagtacttcccaattatgatcgtgcaaatatttacgtacccacgaataaacccgctgataactaatatcatacttactagctgcttctttatagttgttctggtggttaatcgtccactgcacaatctgctttttctcatcaaaggatactttccgacccattttcttaactcgctttcttgttgcgtaagcaacagttagtttgtcactattgtactggataatccattgttttagttgagaaatatggcgtattttgtacttaattaaaacctcacgactagccagtccgttaagctgataatctttcaccgcggcaatctttgtcttaagtgaatatttttggttatgtttaggacgaattaatcctgccagtcctgctaataaaaattgtttaatccatttagtcatgttcgctgttctcacttcgtgatagtcagcgaatattcctaatgagcaatctgaatcctgataattacttagtaatcttaatttttctgttgtggaataactagaaacgaaaaacaccccctagaattggcacttttattatttaaagtgtcaaccctaaagggtattgtacgtccctaaattctttaccatttaaaaataacaaagaggccggaacatttccagcctcttttgtttattgcggaaagaatctgctactttgctagggaactaattattaattcattttgattctaacttccgcaaagtcgcatttatatcatcaacctagtgcaccctggtgaccttattacataaatattcagtctaaaatttcatgtcacacttaggttgcttctagcctactattaatttcttcggtgctagattgatataggagatcttaccattctaatctttccacacttataatgtaccaccaattgtaagcgatttcaagaagcaactttagataacttgaaccaagagaacatacatcgcaatcgcattattaatcatatgaattgcaattgaatttcgaatgtcatccgttcgcaaataaacatatgctaagaccatccccatataagcatagatcaaaaagctaatggggttggtactcatatgaccggtagaaaagattacccccgagaagataactttcggccagatgttgccacgcttaaagaacatatttgtcaatgtaccacgaaaaataaattcttcagcaattggacttagaacaactgccgaaaaacaaaatacgatcgtaattacttcattatgaccaagcatgcttcctagtgctgcattgttcgctgtttcagtttgatgatagataagttgattaaggtagctaaggacatccattcccaaaataatcgctagataaccaccgataatccagccaacctttattcccgccggctgtcctaattggttataagtttcatatgtccggtgtgcccaccaaataatcgctagcattaaacagatgaataagaccatgaacccgtccacgataagctggttggtctttgaataacgtaaagcaaaattaactgcaatcgggggaatctcaattgcaattaacatcagcgcaattaaaatcaccctaaatatccacgattgtttaattacttttatcattatttttctcttcctttgcccgtttctcacgcattcgttgaatactccaccgggtagaaatttttgtcacaatgatgtttgcaaccacgaaaccaattacccagagaaggtacattacccagccagagatataatgttcggcagttagccatacgaggatcgcaaagatgataaatggtggaataaccaccttaagaataaattctgctttcacaaagaaaacctccattattatttgttcaacagtttactaaattggtacgttaagcgcaaggttactgaaaaaaataggagggctgagaaaagttttcgctttcctcagcctccccattgttaatttgtgtttaagtaaatctagttattctttgatgcagcaactacttcgtcataagtaggaattgatggtaatgcaccaagcttttgaacagctaatgaacttgcacgttgagcgtagacaattgccttttcaatgttactcatatcaggctttaattgggatgaaagcgcaccgatgaaggtatcaccagcggcagtggtatcaacagcattaaccttaaaagcaggaataaagttgtagccatcttgagtacagtagaaggcaccctttgcaccaacagtaataattaagtttcggacacccatttgagcaaactttgcagctgacataagcattgaagtttcgtctgtaacaataattcctgttaaagcagcactctctgtttcatttggaatgattaagtctgttaacttcaataaatcagggttaatttcatgagcaggagcaggatttaagattgtctttacaccattttcctttgcaatttggaatgcccgtagagtagcttcttgtggagtttcaaattgagcaatcacaaaatcagcagcggcaatttgatcacgagcatcttctacttccttaacgcttaattgttggttagctcctccgtacactaagatactgttttgaccactttcatcaagcaagatggctgcagatccagtacctgcttgatcgtcaacgtggatccctgttgtgtcgacgttgttgttcttgaggtcattgatcatcatcttaccaccagcgtcatcaccaacttgaccaacaaaagctgtttcagcgcctgaacgagcagcagcaacggcttggtttgctccctttcccccagcagcattagtcttacttaaagcggcaattgtttccccaggtaatggcatccgcttaactttcattgttgtatcaacatttaaactgcctacaattgttacatgatttgtcatttgtttatttcctccttaaacaattggcatctaattgataatatcatcataccatattattttggacgataggaacttgtactatctcgtttaattaattttactggaaagttttgaacgcgggcttccgcactactatgactaatctgttcaatgagcattttagtagctccagcgccaaggtcaaaaattggttgttgtactgtagttaatcgtggataaacatagtcgtcccagtagatattatcataaccaattacagaaatatcttcgggaactttaacgtctaattcatgtaatcctcgcaataatccaattgccatctcatcgttcgccgcaaaaacagcagaagcaccagttgctaaaacatcttttgctgctttatatccgccatccttcgtcaaaggtgcccgaataacatcgtgaataggatctaaacttaggttattttctttaataatatttttgaacccattcattcggtgatttaaattttcagtagggttgtcagaggtaagaacggcaatatgtttgtgaccaagttcaatgaggtgtttagccgcgatttgaccaccaaggtaatcattcgtttgaactcgatcaccctcctgcgtatgattttgatcaaacaagatgtaaggaatctcattaaaggagataacttctttaattgtctctgtagtcatcgttgcactagcaatcactaatccactaattgatcgttcaatcatctgggaaaggtaatatttttccaattttgggtcacggttggcactaaagacgagcggaataaattctgcttcacgagcaacactctgcactccctcgacaaaagtaccaaaaaatgggttagcaatattaggaactaataccccaattgtcttggcactctttaagattaaatttcgggcattgaagtcaggaacgtacttatatttgtcccgtaatgctaaaactcgttcctgagttgctgtgctgaatcgatcgcctttattatttaaaatttgcgaaacagtggttacagaaacaccagcttcttttgctaaatcacgaattgttattttctttttcatggctgttcaacctctttagtaaacagttttatctagttaataatatttaattaatttaaactatctcaactcatattgcaatcacatttcgttaaaaatatcattaaaaatctgtttcccggttgccatctgagtaccacgaacacggagatagtcaatctttgctcgcaaaatatcatattcccacaatgatgacaggtcatggtcattatagtaatgaattgttactttaatgggtgtgagatcagtaattattcctgtaaaatcatcacttcccttatacttttcagtgccaatcacaactggaagacggttctcataggaatcattgataagatttgataataggttcccctgggtaatttctggatggttatcaataaaattttgtacttgccaaatatcaaaatagttgtgatcatgggcaactttagttttttcagaaaccgtcattaagtagtcactatggcgttctgtataaagaatactcttaatccgaatagcaattaagccgttgattttaccatcccagtcaatactgatcatcaaacaaaatactggatcgagagcaacgacaaatccgacattaaaataatcatcatttggcaagttatgaacctcaatcaatgttccttgctgcttggccattgttaattgaacgcgattctcactttcactttcttttctcatctttacttccttaatattaatttttcacatgattagatttttaaaatttaatcatatctctacttttattataatcgctaacaatgtagatgtgataacttttaccacgataagttaaatctggtaaccaccaaatattgtaaaattaggtgtgtcattccacaatattttgtagtaagatattttttgtgacaaaaaagtaaagaggggccattatggtgattattacagcagggatgattggtgtcggtaaaacaactttaactgggaagattgccgaacacttacatacaaaagcattttttgaaccagtcggagaaaatccagttttaccactgtattataaaaatccaaaacagtacggctttttactccaaatttattttttaaacaagcgtttctcaatgattaaacaagcacttactgatgataacaacgtgcttgaccgttccatttacgaagatgccttgtttacgcgagaaaataacgccgagggtaacatcactgatactgaattagaagtatacttaaagcttctcgacaatatgatgagtgacctccaacagttacctaagcgcgcaccagacttaatggtttattctgaaactgattttgaaacaatcttataccggattaaaaagcgcgggcgagattacgagcaaattgatactaatccagagttaaaggattactattacaagatgtggagtgcctacaagcaatggtacaaggattacgatgctagtccaaaaatgaaaattgatttagagcgttatgaccttgaagatcctaagaacgttgatgcggtcttagcaatgattgatgaacggttgaagtcattacgctaaataattgataagagcatgattagaggtttgccttttaatcatgctctttccttttcttcaacaaacgacgaaacatttcaatcattcctgccgtccctaccccaccgagcaaaggaacatattgagggatattaacatcgttctttctcgcttgaacgggatgtttggcaacaattggcatcgcctcactctcctctttcctgtcagtcattggaacaggattagcccgttcattgctggtgttaacttgattatcatatttagtaagttggtaagtatcaatcagctggtttagcttccgatcatactcgggatctgttgcatatcgtccgcgaagtgcccgtgtagcttcacgataatttttggtattttgacggtgaactccttgataaagtgggtcttctaatgtttgcgcataatcccttaacgcttcgtattcacttgcatactgtcgaaaattactaataacctgaaacttatggccttgcttatcatattcagtcgtgggttgagcaactgtttgccgggcaaaataccccttaaccccaaaaagattattattaggcgccttccccaacgtactgcatccccaatcactctctaaggccgcttgcgcaataataattgatggatataaatcatgctcccgaccaatttgttgagcagctgaggctattcgattaataaattgtgcttggactgcggatggttgttgaggttgataaacctgctcatcttttttatcttcttctagcagctgcctttgttcagcagagttttcagttgaagattgaatagtttcatgctctggcgcttcctctgtacctgtcaaagcattattttgctcacttgcctttgcttgagcagcattttcatattctgttaaataagcatcaatatattcttcatcatgattaactaaggcctcttcgtcaatcggctttgcacgttttacatcttcatttgcatcaaattgtgcttgttggataacgtccgctttaaccggttgcccgctaaggcttgttaaaacaattaatgcactagtaataacacggcggtttaacacaataaaacactccttcataatgtcctatagtatatatacgcgaaaattatgaatttgcatttttaaaactaaaaaagactagaagaaaattccactagtctttatgttttacatttcaggatatgtcgtttccttgatatccaatttttgattctttaagtttgtcttaacaacggtaacgtcacatggtgcttcacgaatagtataagcagcagttgaaccgacaagtagccgtccgacaacatttaatccggttgcgccaataatgattaaatcaatatcattttctttaggataacgttccgcaagttcaaccttagcgttaccaacctttacatcagttttaacatcttttattccagcggcttctgcttttttcttgtagtcagctaacttcttttgcatcgtttcgattgctgaatcataaatactatgactaacaaagccgtatccaccaggaccagtacttggataacgttcaccgttgataatacttagtaaatacaacttggcatcattggtcttagcagtgtcaaccgctttttcaaaagccatatcagcttgcttggaaccatcgacaccaacaagaatattttgataactcattcttgacacctccatcttctgcctttattttagcacaaaattaatcagtaacgagattattaattgcttccatgtaaattgccatcgatgtaattaaatcattcacaggttgatattcattagcctgatgcattgtatttggcgtatgtggcattaaagcaccaaatgcaaccccccgcttcatcaaacgaccataagttcctccaccaacaacttctggttttgcgtctgtatctccagtttgatcaatataagcttgcattaatgtcttaacaattggatcatctggatcaacataatgtggagcttgagatgggccttgcgtaactttaatttgtaatttatcggcaatcgcctttacagtatcctctaacttatctggtgtcatgcctttagggaagcggaagttcatatcaatgtgaccacccttgtccgcatcgaagtttaagattccagcattcatagttaattcgcccattactggatcagtgtaagcaccattaaaaccatccattcgcgtatctaaatgaagatagtcagctaagaattcaatgaaattctttgcgcccccaccaaagtcatatcgatttaagaactttgcaaggtatgttgctgcattgattcccttttctggttccattccatgggcagcttttccgatgacagtaatcttaagacctttatctgttgattcaatattaccttcaaccggattttcttcaataaagtgaccaaaatcattcgtaacttcttgaggattatctgtccgaataagggcaactgcttcccgcggtaccatgttgaaacgcaaaccagattcaaaactaactagttgtgttgaagcatccccattgccagcagggacatcaagtaagagtgatacttgacctttttcaccattaattactggaaattccgcatctggtgaaaaaccaagtgtgggggctggttcgacttcaaagtaacggtgcattccagtccagttactttcttcatcagttccaacgataaaacgaactttcttgttaaactttacgccttgatctttcaaatacttcaaggcatagtaagcagccattccaggtcccttatcatcagaagcaccacgaccatataagttgccatccttgataactgggtcaaatggatccgtatcccaacccttaccagcaggcattacatcaagatgggctaaaatggcaagtgtctcatcaccttcaccccattcagcatatccaacaaggttatcgatgttctttactttaaaaccgtcttgttctgccatctctaaaaatgcttttagcgcttgagcaggacgaggaccaagcgggtattcatctgttgccgctgaatcatcacggacactggggatcttcattaatgctacgagatcatttaaataattttctttttgcgcctctgcggctttcatccaatcagtcaagattaatccctccaaaatattctactttgactaattttaatgataccattaaattgtctattaaataaaataataaggagtcttaactgtgaaaaaacttactgaccaaatcttaaaggatgttattactccccgtcctgaaaacagttttaaaggtacttttgggaaagttacccttatcggcggcaatcgtaattttggtggcgcaattatcatggcatcaaccgcagccgtctgtgctggagctgggcttgtaacaactgcaactgatgaaatcaacgctagtgccctccatgcgcagttgccagaagcgatgttcgctgattttactgatgatgccctagttgctgaccttactaaagctgctaccagtgtggtcgttgggccaggcctcggaaatgatgaaacaagtttacgaattttgaagaatgtttttgctcatacaaccgagaaacaaaatgtgatcattgatgggtcggcaattaccctgatggcgatggaaaagcttgaacagccacaaggaaatatcatttacactccacatgaaatggaatggcaacgactctctggaattaaaattggcgatcaaactgaagataagaacaaggaagcccaagaaaaacttagtgctaccgttgtcttaaagaagcaccacacagaaatttatactgatgaccaagtatatcaattgccaatcggtacccccgcccaagcagttggtggaatgggtgatactcttgctggaatggttggaggtttcactgctgaatttaacgagaaggcagataaagccgtcctcgctgccgtttatgcgcacagtgcgattgcggaaaagatcgccgaaagccaatacatcgtccttccccaccaaattagccgtgctctcccagccttcatgaaaaagatagatgggatgaatgaagatcaccatattggatttttgaattaagaatttaaggatattaaaaaggttcagagcaaattctcactctgaacctttttgtatgcattgttatttaatgtgtaaaattgttcgtaatcttgctactcgtggtcccaagagctggtcggctaatcgtgactttaagcagagatagagataaattcctgctccgactattacccccggaatcaaggagaagaaagcagtgtaacgcccatacggactaataaaatgaccaatgattaacattacaatctttgtcccagcaaacatcactaaggagtaagccaaaatctggttagttggcagggccatcttatcaaaacgtaggtggaattccatattaaaggaatgcaagatcaaatagttaatcacaaacattgaaatcccggttgaaaccagtggtcctaatccttcaaagatccaaatacatgggaactggaggataaatttaattacaattccgatggctaaaaacatcatcatcttcttattctcagaaattccctgcatcattgctgcggctacagtatacaagcccaacatgatcgaaatgtatgccgcaaattgcagtactacgacccctgccgcatcataacggtaaaagacggtgtagatttgctgagcaaccgcggataatccaagagcagccgggatcatcacaaaatagaataacaagagaacattttgaatctgttttcgcatatcctcttgatcgttctgagcccgggctgtcgcaagcaacggaataactgttgcggctaatgcagaagctaatgaaataacaatcatgtaaagcttattggcattaaacgcgaataaggcataagtaacatccatctggtacttagtaaagtgaccaactaatggcatcatccgcttaaaagtatattgatcaattaattgaaaaatcgttacccctgattcaataatgatgaacgggattgattgataaataatcttaaaaattaatgtttgggttgaaacttcagtgtttacttcaccttgtgccactaagtcattcatttcgcgttggtgacgcatccaggcaatccctaagacgatcactgcaccaattgccccaataaaggctgcaaatgttgattgagaaacggcactaacccaattaccattttgaatcttcataattaaataagtggccgccaacatataaataacccggaaaagctgttcaacaaattgtgaaattgctgatggtgccatccaattatacccttgtaaaaagcctcgggtaattgacatccccggaataatcaaaatagcccaagccaatgagcggataaccggaatcatatttggatctccattatccattaaacgagctccaaacatcatcactgtcgtacaaattacacccattgccattgcaacgtacattccagaatgatacagtcggcgactaacgccatactggtttattccgttataatgcgcgaccattttagaaattgcagaaggaattcccgccgttgcaatcactaaaaacatattataaatattgtacccctgagcatataaggcattcgcttcgttactataagctcctaaccatgtaacccacggaataatgtacagcgcccctaagattcgcgaagtaatactaccagctgtcatccaagctgatcctgtaatcatttttgtttgcgaatcttttttgactgcggtgctgctcaaatcatttactttattttcttccatgatttgttgcaatcctaccttttttattttaatcgagttttcattttatcgtgaataaaaagttggtgcaattcgatttaccgtttttaatatttctttaatctagtattgttccaaatcaacagttaccattttaatgatttgatctggatgttgttgctttaacgcctctaatgaacttacagctggggcatcttcaaagtggccaagtttatcattaagggtaatcgctaagcccaatttagcaaaattcatcgcctcatccattgttttcccctgggtaaatgcttccggcaaatctggaaaatcaacttgaatttcattatctttcggggtaaaaattgctggataactcactatttccataacttatctgctcctcaaataaaaagaagcaggaaaacataaattccctgccctttcttaatttactattttgcaacaatgttaacgatcttgttagggacaacaatgactttcttaatatccttgccgtcagtaaacttcttaacatgttcgtttgctaaagcaagttgttgtgcttcatcgcggtcagtatccttggccatcttaatcttagcccgtaccttaccgttaacctggacgatcatttcaacttcatcttcaactaaagcttttggatcgtaagttggccatgattggtaagtgattgtatcactctcaccgaattgactccagagttcttcagccatgtgaggcatgattggtgcaatcatctttacaaagcctttcatgtattcaactggtaaatcatcaaccttgtaggcttcgtttacaaagaccatcaattgagaaatagccgtgttgaagtgcatccgttcgtagtcttcggtaaccttcttaacagtttgattgtaaaccttggtaagcttaccatcattgaaagtggatacccggtcacggaggtggttattatcatccatcaacaaccgccatacacgttgaacccacttattagcaccatgaagtcctttttcatcccaaggtaccgattcttcaagtggtcccatgaacatttcgtaaagacgtaaagtatcagccccatattggtcaacaatgtcatcagggttaacaacattacctttggacttcgacatcttttcatggtttgaaccaagaatcatcccctggttaacaagcttcatgaatggttctttagttggtacgagaccgaggtcataaagaaccttatgccagaatcgagcatagagcaagtgaagaacagcgtgttcagctccaccaacatagagatcaactggtgaccagtaatcaagagcttcttttgaggcaaattccttgtcattatgaggatcagtgtaccggagccagtaccatgatgaaccggcccattgtggcatggtgttagtctcacgaagaccatgacgaccattttcgtcataaacgttaacccaatcttcaacatttgctaatggactttcaccagttcctgatggttcgatgttatcagtctttggtaattcaagtggaagttcatcttctggaactaatgaggttgtcccatcatcccagtggataactggaattggttcaccccagtaacgttgccgactgaagatccaatcacgaagacggtagttaactttcttatgaccagcatcgtgttcttcaagccaatcgatcatcttttgctttgcatcagcaatgttcaagccatcaaggaaaccagaattaatgtgcttaccgtcaccatcaaaagcaccttctgacacatctgttccttcaataacaggcttgattggcaagtcaaacttagtagcaaagtcataatcacgttgatctccggaaggaacagccattactgctccagttccatatgaagcaagcacgtaatcactaatccaaattggtagtttttcaccgttaactggattaataacgtaagaaccagtaaatacaccagtcttgtccttgtttaagtcagtccgctcaagatcagaccgccgtgacgcttcttccttgtacttttcaacttccgccttgtgttctggtgttgtcaattggtcaactaattcttgctcgggagcaagaacaacataagaagcaccaaagagcgtatctgcccgcgtcgtaaatacttcaatcttagtatcttcatcccccacaactgggaaaaatactgaagcaccttctgaacgaccgatccagttacgttgcatttctttaacgctttctggccagtcaacaaggtcaaggtcatcaatcaaacggtccgcataagcagtaatctttaaaacccattgacgcattggcttacggtaaacggggtagccaccacgtttagtcttgccatcttcaacctcttcgttggcaacaactgttccacccataaaatcaggggcccagttaaccataatttcactttcgtaagcaagccccttcttgtagagctgttcaaaaatccattgagtccacttgtagaacttaggatcagttgtatttacttcacgatcccagtcatatgagaatccaagtgattggatttggtcacggaaatgatcaatatttttgttcgtaaagttcttagggttatggccagtctttaatgcatattgttcagctggtaaaccgaatgcatcccaccccattggatgtaagacattaaatccttgcattcgcttcatccgtgacattacatccgtagcggtatagccttctgggtgaccaacgtggagtccttgaccagatggatatgggaacatgtctagtgcatagtacttcttttgatccttattaaggtctgctttaaaagttccattctttttccaaaacttttgccactttttttcaatcgtcttatgatcgtaagccatattttctactccttattctgattttgatgatcgtaataaaaaagtcccgtagaaatcaatctacgagacgaaataactccgcggtaccacccgttttccatggaagccatggcgcttaggaccttaacgcggtaaacgtcattacctactaagattcagtaataatcacatttagatgagttcgtaaatgaccagtctcctgttcacaccaccacaggatctctgctgccctcgtcaaaaactactatttctattacgatcaaatatttaacgcctattttaacaaccaccgttaatgattgcaagcgtgtaactaaattattagcctaaaatttcttttaattcatcaactttatcaaggtgttcccatggtaagtccacatcagttcgaccaaagtgaccataagcagcagtttgcttgtaaattggccgcttcaagtcgagcatttcaataattccagctggacgtaaatcaaatacttttcgaacagcggcaattaattcttcttctgaacgggtaccggtaccataagtattaatcatgatcgatactggttctgctacaccaatggcataagcaacttgaatttcggccttcttagcatagcccgctgcaacaatgtttttagcaatatagcgcgcagcataactagcagaacggtcaaccttagtagcatcctttccagaaaaggctccaccaccgtgatgggcagccccaccataagtatcaacaataatcttccgtcctgttaagccggcatccccttgcggtccaccgattacaaagcgacctgttggattaatgaagtacttagtttgatcatcaaggtacttagctggaatgaccgcttcaatgacttgttctttaatatctttcttgatttgatcaagcgaaacctctggatcatgctgggtacttaaaacaacggtgtcaacacgtaacggcttgtcattctcatcgtattctacagttacttcggcctttgcatccggacgaaggtaagagataacgccatccttacgtagttgagcaatcttacgcattaacttatggcttaaaaccaatgttaatggcatatattcaggtgtttcgtcagtagcgtaaccaaacatcaatccttggtcaccggcaccaatcttatcaagcggatcagcttcaccttcacgcgtttctaaggagtcatcaaccccttgcgcaatgtccggtgattgttcatcgattgcagtgataacagcacaattatcagcatcgaaaccgtacttaccatctgtataaccaatcttacgaattgtgtcccgcacaatctgttggatattaacgtaggccttagtagaaacttcaccaaagactaatactagtccagtagtaactgaggtttcaactgcaacccgtgaatcaggatccttcttaagcaattcatctaagatcgcgtcactgatttggtcagcaatcttatctggatgtccttctgatactgattcggatgtaaataaatgtcgttctgccattttctaattcccccatattctattgaaactttcaaatagtttgtagttgcggttacaaggcatcttcacgttcagacgtgaatcctatcgggaattgctttataacgagaataatcttagcataattgtcaaccaacaatcaatgttaatccttacattcttactttaaacgggcattgaccatccccaccgctgtcatgaaagagtaaataattgtcggaccaacaaatttaaatccatccttccgcatttgtttggctatttcttccgaagcaggcgttttaggagctaattcaatatcggtagttaaccccaagtcttgaggctgatcatcaacaaagcgccacacataattatcaaacgtctttcccgttttccgtaattttaaaatcacttgtgcattattaattaccgctaatattttaagacgattacgaataatagtttcatcctcgcataatcgattaatatcttcatcggtaaatgatgccactttttcaatattaaagttatcgaatgcctgattaaatgcttcccgtcgccgccagattgtctgccaagttaaaccagcctgaaataattctaaagatagcattgcaaataactgctggtcatcatgaactggaaatccccagtagtgatcataatagtcttgcatttctggtgtcgcatttgcccattgtggtcgtttaagtgtcattatcaatacctcttttttgttttcaaaataaatagggagcagaaattttcttctccctatttatatacgaatttttggttattttgtacttttttccttattagtattagtattttttagcataaatgctagtacgagaccaatcaattcagtgacgatcatgccaataaatactaaatgatagccgtgaagggaagctacttgcgccgaacttccccgttgaagtgcatttgtagtagcaaccgttaagatcagtgttgaaatagtaacacccgcggacccgagaacttgccggactgttgtaattacagctgttccgtgaggtactaattcatcaggtaaggcatttgctcccagtgtgacggccggcatcattacaaaggcatttccaccttcaatcaccattgcgcaaaggatcattcccaataagctgagatgattaaggacgattaatccagcaacccaaccaatgataatcataaacattcccaccagcattgtcggtttaaacccaattttatcagccaattttcctgacaaaggattcaggatactaagaaaaacagctccaggcactagggccattccagaaacaaatggactaacttttaatactccctgataatagaggggaaaaataattgtcgttacaattaaggcaatatatgaaatcgacgttaaaagaattgctaaatcataattaaaagtcttcaatacccgtaattccaatagcgggtgcttgaggtgaagctgccgaatgcagaaccagataaccgcaataagactaacgataaaaatccctgcatttatttcccatgcaagattcttttttccggtttggtcaacaacgtacataatcccaattaatccaactagtaaaattactgatagccaatcaaggttcgtttcatggcgttccattacatcttggatcagtccgctagcagccattaaaataattatggaaataacaagcatgaagaggataaaaaggctcttccagctaaagaactttagaacaattcctgaaacaatcggtccacaggcaagggcggatcccattaccaaaccagcaatccccatcgttgagccccgctcttctttaggcgtaatctcaagcaaaacagtttggtatgatgggaataaaactccaacggcaaaagcttccatggcccgtccaatcatcataaaccagaaaccattaattccccaagacgcgggggttaaaacaatcatcaaggatccaatatcaaatagtcccagtgccccaatgaacattgtcttaaaactcatattattgagcatccacgggctaattggcatgctgacacacattacgagcataaaaccagtcgtcagccattgaacggttgatgctgaaatcccaaaagcgttcattaaagttggataggcagttgacaacgatgattgactaatcgacatcgtaaaggtaccaactagtaaagtaaaaataaaccaaaagcgactataactttttccattgcgtgcgatactttgatccatatcattctctccttctttagaatagttattatctgaccgttaattattatatgttttgaattagtgaatgtaaatgttataatgtcaatagattataattattttaagaaaggggacgacattatggcagaagcagaatttgatcgagctcttgaccatctccgtgaaaacaaggttcgtcttactccccagcggaaaactatcttaaattacttaatcaatcatcatactcatccaagtgtcgaaatgatttatgatgaccttaaagacacagttgacaatatcagtatggcaactgtttacaatactctaaaactctttgttgattataatctcgtaattgagctaaaaaatggagacggcagtacccactttgattatttcggccacccgcattatcatgtcgtctgcgataattgtggtaagatttctgatgtttttgatgaacattttactgcaatcacgaaagaattaacggttatgactcatgaaaagactggctatctagttacaggaaataacatcgaagtccatggcatttgtcccgagtgtcaacgtaaattacatttgaatcgttagtaaaaaattccccgaaaactcggggaattttttatgctttcttttgtgttaatgaagcaacggcaagaattgcaaaccaagccaatgtcagtataagcgcaattaaagtttgtttctccatacataaaacaattagcacaataaaaagaaaaactaaaataacatagtcagtaaaaggtgcgcctggcatcttaaaagtccttgattgcggatgctgacgaatatattttaaatgtgccaagatgatagcagcccatacaaagagaaaactcgtggtagcaatactggaaacaaaagtaaaaactccttctggcattactaagtttaagatagcggcaattccaataacgactgcagaaataataaccgctgttgcaggcaccgaccgcttagataagcgactaatcttacggataacaggccgatgagcagtagaggttaactcagctagcatccgaccagttgtatatagagaactattacaagcagaagccgcagcagtaattactacaaaattaacgatactagcagcccccggaagaccgatgtcgcgaaaaacaaggacaaacggactattgcttggtgaaagtttactccacggataaatgcacataatgacagccaaagcaccgatataaaagagcataattcgaataggaataccattaattgccttaggaataacaactttaggattctctgcctcagccgctgtcacccctaccatttcaattccaacaaaggcaaatacaaccatttgaaaagaaagcatgaagccctttgtcccggtagcaaaaaagcccccatcattaactaaattagcaggagtagcgagatagccgcttaccgaatgaaaatgaagtaaaactaaaatgacaccaacggcaattaaaataacaattgccaaaattttaataagggcaaaccaaaattcgagttcaccaaacgtactaacagtcattagatttaatcccaataaaattaggagagttattaatccaggtaaccattggggaacttgaggaaaccatagttgaaaatataagccaatggcggtaacttcggccattgccaatgctagccaacacacccaataagcccagcccattacaaaactcacgcgattaccaagataatcacgaatcgcatccataaacgaatgataatgtaagtcggaaagaagcaactctcccagggcccgcataattccaaaacaaataatcccagtaattaaatatgctaaaaggattgctggaccagcagcgtgaattgccttccccgatccaagaaataatcctgtcccaatcgttccgccaagcgccattaattgaatatgacggcttttaagcttacgtgtaaattcttgtttttctgccatgatcctctctctttctcaataattgaagttttattaatcctagttaggtttactagtcattactaaaaaaatcaactatgatatataacattgaaaacctattgtataccatttttcgtagaaggagaaattacattgtacgcattagttcactggatcccattttttatttatttttttgcaggatctgtcctcgttacccataatcacctttgggaaaaatttcctaacttcagccagcatattacaattgcaaccttttttatctatttaactgctatcgactggctttgtctaaccccttcaatgtttaattttagttctgctaacaaacttttattttattttcacggcgtaccatttaatatcatccccctccaaggactcagccaagaatttttcttaaatattgtgatgaccttaccactaggagtttatctttatttaattaatcaccaaatgcccttcagtcgtgctattctttacggctttttcttcagcttatttatcgagtgtaaccaatttgtttgcgaccttcttttccatattggaagggttgccgatgtggatgatttgattagcaataccatcggaactacaattggttttgcagtaatgattatacttgatcaaacgatttttcatcaagttattaaacaatttatgctagtaggtggaaaatctgataaactgaataactgaggtggtaaaagatgattacaaatgaacaaagagcgcatgatattgctcttaccttactacaatcccgagcaaaagatctaaagccaatcgaagcatatcatgaatatgtcaattcattattaccaatcttaaaggagattgataaggattttcccaacggtattaaagagcacctttaatttcccgggaaattacgacaaaaggagctgtgacataagttaggtcacttccacaaaatacgaacagcgcagtataacaatggccttcagcgttcgaccttgccggacgctgaaggcctattgttgcttgcgggggctcccagaggctagcttcgcatcaaaaaacaaagtcacaagtaacttctgtctcgctccctttcctacgattagtcaagaaaaatatttagaaaagaagagtatactaaaccaactcggttcttcttcaaaaatcgagaattagtggtatattaaaattgtgaggtgattatgccttcacagggaccattgagtccgtataccgatagtggtatttttcatggtgcttaatcatggataagagacatttcagagttttattcatacaagctaccatggcgaccttgttcagttttggatgaggtcgtttttcttttaaacgatagtaatagtcaacgatatgattagaattagcgtgttgttggcggatcatattacctacagtaaaatataagagcttacgggcaatcgggtttccacgcttattaatgtgatcttgacctaaataggttccagattggtaacgacgaatatcaattccgacaaaggcattaagctgattggcattgtcaaagcgactaatgtcgcccaattctcccattaactgagccgcagtttgtttcccaattcccggaaaagagcagtataggatatactctggtaagcgctgggcaatagattccatccgcttgataacctcttcccttttacgggttaaggcaattaattggcgagcatagtagcgaacttcatcaacctgaatggcatcaccagaaacagccggatatgatttttgggcgagatcgattaatcgatcggcatacttataagctttcatcttagatattcgtttatctgtagatgccattagaatattctttaatttaactctcgaataaggcctaactagtgctgaatgaggaaaaagctccacgatattcaacgctaatttagatgttctatttacaaataattgcttaagttctggaaaaacttgttcaagtgcagtatgaagatgatttagacgatagttccaatcagcattgagctgattatagaaccgactaagctcatgtagctgaagatagtcttttttccaaggaactattaatcgaaaagtattttcctggacagtgagagcaatccggtgagcgtctttctgatcggtcttaactcgtcgtagactctcggactttaaatgaagttctagcggattaagacggcaaaagcggagaccattggtctcacagaaatgttcaattactcgcgaataaattccagtcgcttcaaagtagataattgacttctgagctttcttaatcatatctcgtagagcattaaaccccgctttcgtgtgtactaaagaaaactcctttaaacagtgtttccctcgataccagacacagtagcttttccccattgaaacatccaaggcaaatatatcagccataaaaaaacttcctttctataaatagagctagatataaccgctatcctagatttgtacttcatttcctaaatactcgaactcgtagttccacaacctaaaagcaaaatatcaaatcaaagatagcggagatcattttataatacggactcgaagtccctgggagcatgatcgatcttagctctatcttcagaataacaaaaaagtccaggacaataattatttttatcctgaactaatcttaggttgtttactatttcatcctatatgtattatactaccttgttgagatttcctttcttcttgttttattaacccatttgaactatgatattaataattttatttttagggaggtttttcaatgtttgaagaaactaaaaagggctttgactggtttagcctaattgttggggtcttatttatcattgccggaattgcatcattcacgcggccagataaaacccttcacttcttagccattgttgccggaattacttttattttccgcggaatttatgaattatggttccgtcaacgaatcggtcgaatcttaggagaatcctcaggttggttaattttttctgcaattttagatatcattttaggaattatttttcttttccaaccaagctttggggtactcttcattgctatcatcttcgctatctggtttatccttgattctatcactgagttgatcagtgcgaagtttttcaaggaatttcatcgtggatactactggttcattgtaattctagcaattttgagtttggtattaggagttattcttttatttagcccattactttccgctattacagtggtatggttagtttcaacattcttgattgtgttcggaatcatgaaacttattcaagcattttaacgtataccttatattaaaagagatcagttttgctgacctcttttaattttacgaatattttgaattataagccttgttccgtcatcaaatattaggtggtgagcatggtgatcaattcgttttaattgccccgtgtattcttcataaaaaccagtcttaccattaaagaattcaacttttattaacggatgtgatcggccccgttcaatcatggcaagttggactctaattcgatgcctcatctcagctgtgggataagtcttatgaccatacttttcccctacctttgctaataattgatggtagccggtcaaggccgcaaaaggagaaaactgagcagcgcgatcttcggtggtcattggcgtatgagcttgagaaacatgccgaggggtgttgataatatcacgatactttgaggtatcactaaacaagcttttttctattttcagcaaatcttcattttccattatgcttggtgccctccaatctgattatttctttccaaaagagtagcaccttttttcaaatccgccgctcgaataatggcgtttttaccgtactcattttgcaaatcaaggacaagtctttgtagtttttgatccttttcttgaactttggaacgattcttatgttttttcgttgaatccgtaaataaatctaactgctcattataattcgccaatctggcaagccgtggtgagagaaggtggttcgctattaccgtaattttacgagctgtcaatcgccggtcaaggccagaatcacataacttcataaatgcctccatcaattctgtaccagatgaagtcggtaaggaaagattagcttttccatgcattggctttggcgcctggcgtccatagaagtctgtcactaatggtccttggtaatcctccgatatattagaaacatcataggcgacccttaaagctacttgatcagttactaagttttgcttggttaactggagagctaatgaattaaccatctcttgaatcactaaccgggtttctgtaaagttataaggtcgaggcaacacctgcccagaatacaccccatgatctgatgaatgataatttttgatatctttaatggtggctgactcatatccccacgcatggtcaataatgatttccgcattttttccaaattcgcggtataatacttcttcattcattggatcagataactttcccaaagaacaacgagcaatatctcccattgtatgaagacctagcttttttagtcgtcgcgcatatccaggaccaattcgccaaaagtctgttagtggctggtgcgcccaaaggtaacgacgaaaagtatgttcattcatctgtgcaatccggaccccgtcttcatcccctggaatccgtttagctactatatccatcgctactttcgctaagaaaagattggtcccaattcctgcagttgcagtaatttgtgtctctgctttaattgtttggatgatttccttagctaaagaacgggcgctaacatggtacttattaagataatcagtaatatccatcattacctcatcaatagaataaacgtggatcttttctggtggtaaatagcgtaaataaatttcatagatggcggcacttttttcaagataaaaattcattcgtgggtgcgcaatactataaccaattttaagttccggtgattttaatagttcatcccggtaaattgaaacaactggtgataatcgctggtgagacatttctttggcacgacgattattcaagtacgctacccgttgttccacctcatacaatcgcgggcgaccagaaacgccaaacttttttaaagctggtgagacggcgagacaaatagtcttactagttcgcgattcatcggcaactacgaggttagtgtttaagggatcgagcccacactcagtacattcgaccgaggcatagaatgattttaaatcgattgccatatatgttcgccccatcatgagaatacctccagcacttcagtaaatactattatatcttcaatcaaacatatgttcaagaaacggatgaaaaataaagggttgcagaaagtaattttccacaactctttactcagtttaatttaattattcaatatcaatatgattttcatcgtcatcagtctcatccttcttaggaagagtaattgtcaaaacaccattcttgtattgagctttgatatccttcttatttacatctggtaaacgatattgccgactcatttggccataccgacgttcagaatgcagaacattgccatccttatcaccatcatcatcaaagatatcccgatgaccagtaactgtcaaaatatcattggcataattaatgtgaatatccttcttatcaaatccaggcatgtcaatctttacggtataatttttgtcatcttctgtaacatctgtcttcatgtgatcagcaaccggagttaggttagagaagaaatcatcgttcatccagttacgcatgttcatcaaactatcgaataaattattacggttttgtaattcattagccataaagaatgcttcctttctttcttattcattgtctatgttaaacgctttcaactaaaatgcaactaatatgctagggaccattgactaaaaagaatataatagaagtaggaaaatagaaaggagccgcgcaagatgaaaaaagtcacaatcaatgatgtttcaatgcccgcaattggaatcggaacatggaatatgggaaattctctcgtcaatcggtccacagaaattaaagccattcaaactgcaattgacgttggcgcacaagctattgatactgcggaaatgtatggcgatggtcgttctgaagcacttgtcgctgaggccatcaaaccatatagtcgggaaaagctattcttaattgataaagttcttccttcaaatgccagcaagacaaaacttgagcatagtttagaccaaagtttagctgccgtaggaacagactattttgacctttaccttttacactggcggggtgggattccgttagcagaaacagtcaacgaattagagagagttaaaaaggcaggaaagattaaagcatggggagtctcaaacttcgacgtcagtgatcttgaagaattatggcgccttaaaaatggcactgattgcgttgccaacgaagatctctataatctcgatagtcgcggaattgaatttgacctccttcccttaatgaaacagcatcagcttccattaatagcctactctccccttgcacagggtgacagtctatctggaaagttaaccgagaatccgctactaaaagaaattgccgcaaaccaccatatgaccgttagtcagatcatgcttgcatgggtcttaagaattggaaatatccttgctattccaaagagcagcagcccaaaacatgctgaagaaaatgttgcagctggtaacattgaactaagtgatgatgagttacttgctttacaaaaagagttcccatcaccaaataaaaaagtacccctcgcagtaatttaagagttacaatgtgacataataaagctaaaaatcgaactacaattttgcatttcacaaagttgcagttcgatttttcatatatgaggaaaactaataattaattttcttgattagcctttaccgggtgatagcgatgaagacgttgagatcctacatcgatttctgctggattacctttgtggcccggcttaatctcaacaaggcctaacttaatagcccccacaggacaaacaagtgcacacagttgacaaccgacacacttactcttatcaaaaactggttgccgtttttcatcatcccaagttaatgcttggtgagcaccatcttgacatgagataaagcaacgtccacaaccgatacacttatcccaatcaatcttagggtaaaccttgtaatttcggtcaagctgattagtaggaataatattcttattagctaagccgacaagatcttgaaggtggtctacatgctgttcttccatgtaatgcattaaaccattagtaaggtcatcaatgatccgataaccatattccatgatcgcagttgtaacttggagagtagtggcacccaaaagaataaattcagcagcatcttcccaggtttcaattcccccaattccagaaatcggtagttgttcaaggccggctgctgaccgtaattgttgtaagaaacgtaaagcaattggcttaacagctttcccagataatccagaaacagaagatttaccatcaatatttggtaaaccaactttcttcttcagatcaacatcaacaattgatttaacagtattgattgcggagaagccatctgcccctccttctagacatgccttaacaatcggaaccatcgtcgtaatatttggtgtcatcttcgcaagaactggaaggctagtcccgcgtttaacggcttcacaattcttcttacataattctggattagttcccacatctgaacccatggtatgagaagtcatctgtggacaagagaagtttaattcaatcatatcagcccctgcctcagttactaacttagccaggttggtccaatcttccaatgtctcacccataattgaagcaatcaagactttattgggatattcctcttttaaccgtcgcatatcagccaagtcctgctccaaggggtgttctgataattgttccatattcttaaaggcaacaaaatgcatgtcttccttggctaattcgtcgaaccgaggagaaacttcatcaatcttaaagtgtgttggtgataaagtcttatatacgataccgccccaaccagcgtcatatgcattcttacacatttcgtaacagttcccaacaggtgaggacgacaagcaaaatggattttcaaaatgaacgcctaaaaagtctacagataaatcttttttaatcattttcttgtcctcctaacaaccggtctatttcttctgctacttcttttcctttctgtactgctaccacaacggttttatctccggcaacaatatcaccagtcgcaaaaactttgggatcttttgtccggaatcgtggttcacggaatggaatttcattatgctgtaagtcaatgtctagtccttctgcattcgctttttgaccaactgctaaaataatcttatcagcagtaatagttaattcactcttaatcttccggtgagtaaaggtagcacgattctgatgaacttcttttggaacgtaaccatcaacaattgttacaccagcttcttgagcaccggcaagttcctttttagaagctttgaattcatcaaactgctcataaacaacatcggtaacataaggaacattaagcttctttaaggttgttacaacatccattgcaacatccccaccaccaataacaaggacattttgcggaagatcttctaaattacccttacttttttttgcccgggctaggaatgagattgctgattcagtacagatattgtgttcaaacattggaagcatctttgcttcacttgtcccaatagcaacaattactgcattgtaacgagctttaaggtcatccattgaaatatcttttccgacagttgtgttatagataatgtgcgcaccaaggtcgacaattcgttgaacttcataatccacaatttcttccggcaaccgatactcaggaatgccgtaggtcaagtaaccgccagccttagcagctttttcatagatatcaactgcatagcccttttcacgaagagtcgtggctgcctgtaaacctgatgggccactaccaatgatggcaatactcattccgtttggcttaccagctttaagaatcttcatattcatctttcgctccatatcagtgacataccgttgaatcccaccgatatcaattggtccgtcgattttagcccgggtacatgccttttcacagtaacgctcagttggacaaacacgcgcacagattgatcctaacgcattgttttcccgaatcgtttcagctgcccctttaacattacgaaaaagaacacttcgaataaattttgctggattagtatgtgctgggcaagcttgtgaacatggtgcatcatgacataataaacatcgtgcagcttcctgcattacggttgtcatcgtgtaacctttcgactctgtttcatactttgaagtcattagacaccctcctctaagttgtgactctttgacaattttgtgataaacgtaactttatatataaataatattatataaacgctttcgatataagtaggcgatccccttaatatattgcatcgtttattcttaaagttgatattttcgtatatataatatgaatatttttatttaacatctacaacagtttttgtatcaaaaatcacaaaaagagtcttattacttaatgaaaaatcaaattccttgtacaattattacagagacatggtttggttaaattgaaagaaggattaacatgaaatttatttcttggagtgtcaatggcttgaagtcagccattaatcatggatttgtcgaagattttaaacgccaagatgctgacttcttctgtctacaatgtacacgattggataaaggcgaagaaccgattcaaattcctgattattaccaatactggaattatgcagaaaagaagggttattctggtaccgccattttcactaaatataagccagaaaacgttatatacggaatgaataattcaatttttgataaagaagggcgactaatcacgctcgaatatccaaacttctatttgattgatgtatacgtcccagtttcaggtgaaaagctgcaacatcttgattatcgtctcgactgggatcgcgctttccttgattatgttactaatttgcaaagtagtaagccagtaatcattggcggtgatatgagcgttgcctatcaaccaattgacctagcagagccaacagaagatcatcatgaagccggctttacaaaacaagaacgagctgattttggtaaattacttaatgctggcttgacggatactttccgttatctccaccctaatttgcatggtgcatatacctggtggaattatcgttatgacgcacgggaacgaaatgtaggttggcgtctcaactacttcttagtttctgatgtatggaaagaacgaattgaagaagccaagattctttcagatgtcaaaggttcaagtcactgtccaattgaacttgttgctaatgttgaagtataagaaaaacgagctaaattttataatagttaaacgaaaagaggttagaaaaactaaaatttttctaacctcttttatcgtatgtttgaaatttgttgattatctattttattaaatcttgttttagtaccaaccgtgtgattgccagaatgattgagcagcactccatgaaccgtaacggttagctacatattgatcagctactcgttcttggttagcttctgagtagtcaccatttaagtatgatgctgacaattggtacttaccaatatattgaccattccgtgcactgtagctaccacctgattcgcgagctgcgatccaagccttagcagcagcatcatttccaactacatttgagttatagccagttgatgcttgagcactagattgttgtacattttgtgtttgtggagtttgtacttgttgttgagcaactggtgcttcttggtttgattgtacttgttggttttgttgtgcttgattttcagcaggtgtagcttgtggtgcaacatttgcggctggtaaagtagcaacttcttcttgagtagctggtgcaacttcaccatcatccttgatcactaattgttgaccaacgtaaatcaagttcttatcaacaatattattgttgtttgctaatgtatctacaaaagttagatcgtgacctaatttgtaagaaatcccagaaagggtgtcacctgcttgcaccgtgtaaatactgtcggcgtttgcagtcgttgcagtagctactgttcctaatgcaactgcaccagtaatcgctgctgtaatcttggctactttcttagataacttcattataaattcaatccgtccttttctcttaattaatcaaataactcatttcaacgataactactatacaggattagggttacgagcgggttactaggacttatcaaatttcgttatttctgtaattttttgtaacaaacgttcgctgatttttttatagtcgcttaaacgttgatttaatcgcttttaagtaacttgtaaaattataactagaattatctcatgtaaaaattattcaaaaaaactgctcattttttcttgacgacacaaaaatcgccctgtaacggactgtttgttacagggcgatgacaaaattgtcttaatcgtaatcttaattattcatcaaaacatcaagcaattcttgagctgattctttcaaagcatcctttgacttgtcattaccaaggtgagtaaagatttctccaacgtatacatcttggtcaaatagctttgtaaagaccttgtcaataatcggcttagttaattctggttcttgaactgggccaaatgggttagcaaagaatgtcttgctcattccaacttcatcagttgttccaagggccttccgttgtccagcaataaatactttttcggcctcttcctctgtatcaaaacgatgaataccaacttcatcactgtaattgttagcgtatagccacatatcaatatggtgatgtttgattacattttcgtaagtatcagcaggaataataacccgggcattcttctgttcaggattaaggtaaacaccacggtccatgttattgaaggccacggcactactcaaatcatcaagacgaacaaaggcaccagtttctgttccttgagcatatacccctggttcaccatcagtaagggtaaagcttcccatgtcatcaaagattgtctccatgctgacaatcttatcgtcagctaattcttgtaatgcttcaattgattctgactttccggcacctgaatcaccgaagaaaacaacattcttttctttaccattagtaaatttaatcttcaacatggacccgtgaattggcaggcgaccattgtaaatttgatgaaggttatggagcgtcaagcacatcttcttcatgtaaccaaagtaagtagtcttatctgtgtaaggtacttcaccaacccacaaatcattcttttcgtcacgatagtaatgagaaaccatgccttctgtttcttttagaccgaaaagaagaatcatatcaggtttttgccccttaatctcatcaggggatgcaatttcaaataagtttgaaagagcgattccgtttaccaagtaatcaacattgaagtaaataaaggctaaactttcaccaatctttgctgggtaacaataccacttaccacgttcaccacgaaaacgttcgattgggttatcttttacttcagaaaagaccccttcccgtttgttactcttagtatgcatcatcattggtggacgaagcatcacggtattaataaaatcaatatcctttaattcttcataaccagctggaattttccaatcttgttgttgaactaaaattgttgcgttagttgccgcattaacttgtcgataagtccggttttcaaaaccttggagcttttcttcgaggatccggtatgctttacgcactaagtcgttgaattgggtatcaatagtccggaactcgttaccgataatcttattatcactaagattaattaccgatacccgtaatagtgaacgatagtatgagtataattcttcaacactctcaagaatatctttagggtcatattcatcaaatgcactatcatcctcaaaaagaactttctttaagatatcaacaaacttgttaacagtggcattatcaaaagcatcatcatcattatcagggttacgtgaagctaaatataaacggacaatttcctttacttcatcactattaattaatgaagtaatatcagtaaagtaattttgactatagtttaacgttgcaacaccgcggtcaggatttacatataatgattttgtatcaataatcttactctcttttgacatggatctcatcctttcatcacttgaataactctattataatatattttttaagattaggatgaaaataatattaactttttttcattttacaaaaaataggaaaccatccccttattgagacaatttcctactttaacaattaattattaaattttagtaccaaccgtgtgattgccagaatgattgagcagcactccatgaaccgtaacggttagctacgtattgatcagctactcgttcttggttagcttctgagtagtcaccatttaagtatgatgctgataattggtacttaccaacgtattgaccgttacgagcactgtagctaccaccagattcacgagctgcgatccaagccttagcagccgcatcattaccactaacatttgagctgtagtttgaactagtagcttgtgcttgtactggtgcactgtagctttgttgtgcagcagctgaaacagttgattgttgtggagatactgattgtactggagcctgtgattgagcaggagcagaaaccggtgcagctgatgattgtacttggcttgttgctacaggagcctgactagcaaccaccggagcttggctaggttgttgactttcaacactagctgatgctggagcttgagatgcttcaggtaaagtagcagcttgttgagcagttgcttgggttacttcaccgtcatctttaattactaacttttgaccaacataaattaagttcttattggcaatttgattagttgaagctaaagagtcaacataagttaagtcatggcctaacttataggaaatacttgataaggtatcaccactttgcaccgtgtaaacagaatcagcattagcagtagttgcagtagcgaatgttcccaaggcaacagcacctgcaacggcagcagtgattttcgcgatgtttttagttaacttcataaagaaaaatcccatccttttcataaaatacttttttattaattagttatttattagtttaatttagtttaagttgttgagtcctcatatctctcaacacctattactatactcccccaaaattacatgcggattactccgaaatatcaattcagttgattttcgtaatactttgtaataaaaattttaatagtctgtcaagcaaatcaacctcggccacgtcctgatagtaacttaggtttggctaacttttccccagaattagccaaaatttgtaacataataataaataagtcgctgaatttttcttataaagaagaatttcaacgacttatttttcgttattaatgtttaattgtaacattgctgtaattaactttagccctattcagcagtcattatttgttttagccaacgctcactactagctaattcttttaatggatggatatcttcgctaattgggagtggttcgccggcttttactttaaaaggtgctccagtgaccatttctgaatcccgatattgggtaagagtggcagaagtttccttaccaaaaccatcaaccattgcggttaactgctgcgttccgcttaaagcaattgtgggggtccactgagtattttgaccatccagaaaactataaagatcgacagtagctttagtttgaacttgactcgctacttcaaactgcagcgttgaaccatgggcttggtatgcatggattgtccgatagatatttttactagttgagcgatttgcctgccggtacgtaacgtgcgcgttagctccaactaaaatctccgttccttcatatgatggtaataacgtatcattaaccatccgttcttcaattaccgcattcacctccgcactgatgacaataatattatgggtgtttgcagagttaagatggggactaaagacaattggacgctcctgagtaatttgtggacgcaaatatataaactgtccacagtcaatatttgcaagatgcatggccgctaactggttatcctgccaaaagatggccttctccattaaattttcttgtaatagtgttgagtattcattaaccgcttgttcaagaggcatcgcagttaggctatcttcctgtaaagaaagccaacccctacttacaccagttgttctcttttgccagtgatctatccattcttcttgaccaggtaaagtcggaaaccgtgattgcagtataactgctagttgacgttttttctctaaccatgctggctctttcttccaaatttttgccatcattttctcctctaatgaacaagcttatcccaaataaccactttccccgtttgaagggattgcggaacatcaataattcgttggttagaactccctctaaactgaagggtaagatcctttttagccagcaagaatcgaccatcgactagaatatcgaggtagtgtagaagttcaagtttatcgctcgactccttcattaattcttcccaagtataaccagaccaagaccaaatatccttttcgtgaccgaattctttccgaacccgtttaactaacttcagacaaacctgagtattaaggaatggttcgccacccaataaagtcaatccttgaacataactctgcgaaaggtcttcgataatctggtcttctaaatcctgggtatatggctgtccataatgaaaattctgcgccgccttgttatagcattcggggcagttaaaaaggcatccactaacatataaactacaccggaccccttccccgtcaacaaaattgaagggcttatagtctgcaatatattgtaatgaatgatcttttgctaaccactcttgcaacttaggattgcggggtaatcgtgtttctgccatttctttttcctcctatataataaaaggccggtagctttacgggcaactggccttttgataattaattaaatttgatcaccaataatatgagcatgagccttattatccatttgccgctgttgttcaaattcagctgcattcttgatcattccagcattcatatgtttaactcggtgaataatttcctcatgccgtccatgaaccattggccgctgctgagggttaccaagataaccacatgtccgcttaacaacgtcacaggttgctgggtcatggttcccgcactgcggacacttaaagccgcgagcagttgcttcaaattcacctttgaagccacacttaaagcactgatcaattgaagtatttgttcccagataaccgacatgatcatatgcccagtcccaaactgcttctaaagcttttggattttggcgtaagttgggatattcgcaataatgaataaaaccaccagccgcatacttaggaaaagcctcttcaaatgatagcttttcaaatggtgtcggatgtttacgaacatcatagtggaaactatttgtgtagtattccttatccgttacatcttcaacccgaccaaacttcttcaaatcatcttggcagaatgtatctgttaacgattcagcaggggtggaataaagactaaagtgatatccttcttctttttcccattcagcgcataaatcatgcattgccttagtaattgcaattgcaaagtcatgtgcttctttattatgctcccaatttgacccatagaaagtcgtacatacttcatataaaccaatataacctagtgaaacggtcgcccgactattcttaaagacttcatcgacactatcagtcttctttagccgtttaccaaatgcaccatacatataaagaaggggagcattttctggcttggcttctttagtacgcttaatccggtaatccaaggcaatcttacaaatattcatcttctcttgaaaaatttcccagaataattgcttatcgccatgagcctccaaggcaatccgtggcaagttgactgtcactacccctaaattcatccgtcccgagtttacttctttaccagtttctggatctgtccatccctgtaagaacgaacggcaacccattggtgtcttaaagctccccgttagttccttaatcttgtcatacatcaaaagatctggatacatccgctttgttgaacattcaagcgctagttgcttaatatcataattaggatctttagggtcaagatttaagcctcgtttaatagtaaaagttaatttaggaaaaatagctgtacgatgttccttaccaagacccttaatccggatcttcaaaatggctttttggatctcccgggcaatccagcttgtccctaagccaaagttaatggtcgtaaatggagtttgaccttggctagaataaagggtattaatctcatattctaaagcctgcattgcatcgtaaatatccttttttgtctttttacgagcaaattcttctcgtttctctggtactatccactcttcggcatccttcatatgcttttcgtaatttagctttgcatatggttctaataattgatcaatccgattagcagaacatcccccatattgcagagacgccacgttagcaataatctgcgacatctgcgcggttgctgtttgaatcgagcgtggtgaagaaacccaagcattaccaatcttaaatccatgcttaaacatctcatcaaagtcaattaaacaacagttagtttcaggtgttaccggtgaatagtcaaggtcatgccagtgaatatcaccacgaagatgcgccttagctacaataccaggaagcatccgtaaccccaatgcacggctcacgactccggcttcaaggtcccgttgagtattaaaaacatggctatctttattagcattttcgtgaacaatccgtgagtttcggtcgaaaagctgctctaacttattttggggattagtagcttcggcaaatgcttcttcatcatgttggcgataatcacggtaaacttttgccaattcttcatgattagcattaaccagtccttgaacaaagagatcggcaatctttttagtagtgacagttgtttgattaagcaaggcatctaataaggtaacataaacactttggctagtctgctcatcagcattgagcgcatttaaaataaggttaatcttataggaatagaatggtgttactgttccatcacgtttaactacttgaacacttgttaaactttgaagatccttcttatcaattatttgcactttcatttttatttcccctctcgtaattaacgttatctatcatagctcaaaatacaacttataggaagtattgacattcgaaacactatatgttgtggtcaaattatttatttaaatattctgtttatattctattctgatctaccaggaataaaatgaggatacaagcaacgacgctattttgagattattgtgagaccttttaaatcatttatttttaaattcctattatcactaaatagaattttttatcccgaaaagcttgaatttgaaaacgctaaacctaacttaataatcttaatcaatatacttaagattattagttattaaaaaataacttacgagcatatagcacgatttgctagactaatccttgtgtaatttttaggataaaaggagtttttatatttatggaaaatgctttacaagctcgtaagcaagtagcgcatccaggattgatgatggttagtatgctactaggagcttttgtcggaatgtttagtgaaacttcattaaacattgcattgccaaaattgatggctgcttttcaagtaagtacgtcaacaattcaatggttagtcactggatatatgttaattattgggattatcttgccactgtccagtattattactaaatggtttacgacccgccaagtcattatttttgcattaattgacttcatggttggggcttgtatttctgccttagcgcataattttactattttgttgattggacgaatgattcaagggatcggaacaggtttaattcttccattaatgtttgcagtggtaatgcaaatcttcccacctaaacaaattggagcagttctaggaatgtgtgccctcgtgattatgtttgcccctgcaatcggtcctactttaaccgggctaattcttgctaaattatcatggcaatggatcttctggttatttattccgtttttatttattgccttgatctttgctatcactccattagaaaatgttggtgaaattactaagccgcatgttgatgtgctctcaattattgaatcggcagtaggttgttcagggctcgttattggtgctagtttggctagtgaagatggttggacttcacctacagttctcagtgcgttaataatcggaattattgtcttaatcttttacacccatcgccaacttcatctggaagaaccaattttaaatcttcatatctttaagtatgcggctttcacaattggttcttcaatcgtgatgcttgactttggaattattctttctacgatgtatcttttaccgttattctatcaacgagggctcttagtttccgttgcccttactggactagtaatgctccctggtggaattattaatgcagccacttctgcagttgcaggtcgcctttacgatagtattggggctaaacgtcctgttttaattggttttgtccttgctttatttggcgctttgatgttggccttcactacatcacatagtgcacttctttatgtaatctgtgcccatatcattttaatgattggttgtcctctagcaatgtctcctgcacaaactagtgctctaagtacgctttctggattagaatctggtgacggcagtaccatcatgaatacaatgcaacaggttatcggtgcgcttgcaacagccttagctactggttgcttggcttggggtagttcttctattagtggatccgaagctattcgctttaccaatggtttccactacggcatttactttgcaattatcttaattgtggtggcactgctcttatcattcaaaattaaagatcagaaaaactaaataaatcctcactactcatgcaggtagtggggatttttttactctttaacaattttatacggcaagtaatggcggcgatggttagtcagataactatccattaactgttggtaaaattgtggattcacgcttgattgtatacttaaaagatcaaatttttcattatccttttcaacggtataaagacccgttttgccaaaaccatttttggcgtagaaacgatgccgtctgagtcgctgttcgttattgggtgcttgaggatctgggcgttcagcgctaagggtaatctgctttccagcataccgttctttgatcgcggttagcgtcgcactacccaagccctgtccatgatagtgaggatcaattgccagaaagaaaatataggcgatgcgcttgttgtagactgtgtagaaaaagccaacccattttccctcttcattataaatgctacaaaattctgcttttcctgctttagcacgcattttaagtaaagataatggtaaaagttcattttgtggaaatacggtattataaacccgcttgatatttttgaaatcatttgaatttgtagatatttgacgaactttaatcatttaaaaatccctccatctatgtaatagtacctagaaaaaacttaccagacaagaaaaaagagactagctttaattttaattaagcttcaatgaaatcttgctctttcgcatgtatgtttttacagcaaaacatacctcttaaaattaagtggtctatttttgaaaactggggtgataatttcattttgttctgccataaattaaaaatctccttactgatgatagtctgtaagcagtccgtatccacacgtctagccatcaaaaacttagtctcctatactaaaagcaatcttagtacaggaggctttttctatggaaggaaaacacgatattgtagcaccaatttttaagaccaagaattcagtagttaataaggaagaatttattcctcgacccgccgcaaaactacaagctgataacattgaattaacgatctttaagggagctaatcccagtcttgcgactgatatagctaaagtggttattcgttatgctcattaattggtaggcaccggagcatgtttaccttgtttgtggtaagacagatctccgtaaaggaattgacggtttagcgatggtagttgcggaaaactttggattggatttatataataattcgctctttttattttgtggtagtcgcaatgatcggttcaaagccctttattgggatgatgaaggtttcattctgctatataaaagatatgaaaatggtagtttaagatggcctaagaacaaaagtgaagttaaagaactaaaaccagagcaactaaatgccttatttacaggtctatccccatttcccgagcgacgtattcatacaatcaaaccaggaaatctatactaagctctttttaaactgttttagctctgatataataacaaaagtttattagattggaggtgacgtacaatggctgagtcattaaagaaagaaaacgaagcactacgtgcgcagttgaagaaagctcaagaacaacttgaacaacaagcaattacaattaagcaactgcaggaaataatttttggaaaaaaaactgaagttttagagcaggtagctgatggacaattatcactgtttgatccagttgatgatctgaacttggatcaagagattactgaagtagttaaaacaacaacgactaagatcgtacgtcatcgaccagcgaagaaacagctaactcgtcaagagtttttagaccaacttcctcaagtcgaggaagttgtttctttaaaaacgaccacctgtccagattgtcagcacaaaatggctcacattggaaagaggttagcacgacgggaagctagactaaaagagcctgaattgtattgtgccaacttatatgaggaaagctataagtgtaaacactgtagtcaagatggaaatgataaattggtaactagtaaggcaccaatggctttattaccacatagttacttttcaagcagtattatggcatttatcgcctatttaaaatttaatctggcgttgcctttccatcggcaagaaagctttgtacaagggttgggattacctgttagcgccaagcaaatggcctcgaatattattaaagttagtcaaacgtacttagagccgttgtatcagtatttaagcaatacagttagacaagaaccagtcattcatatggatgaaacaccttttaaagtcgttgatagtcctaaatcccaagactatttctgggtaacgcggacaacgaaagagtttgcccaacatccgattgtagtctttcatcacgccaatacgcgttctggtagaatcattggacaaatagtcggtaataattatccgggtattatcatgtgcgatgggtataaagggtatagtaatcaactctatccgcaagcaaaatttggttcgtgcttagtgcatattcgacgagaatttgtcaaattggtcaaagcactgccaaaaacaatgaaggcgtccaaagcgcaacaagcaataactcttcttagtcaggttttccattcggaaaaccagttgagttatcaaacggccaatgagaagttagtgcagcggcaaatccatgtcaaaccgctaatggataaattttacaattacattagccagattagccagccgattggacagttgcgtaaggcaattcagaacgccatccagttaaaatcacgagtgtatcatgtatttgaaaaaaatggacaattaccgttaagcaacaattcagttgagcaaagtattcggccatcaacactaattcgaaagaattgtctattcgcaaaaaccgaagaaggtgccaaggcgaacgccgtctactatagcttagtagagacagctaaactaaaccagcttaacgtccagcggtacttagaatacttgtttgatcacctaccagagagcaattgtcaagatctggcagcttttttgccgtggtcaaaaaacgtacaagaagaatgttgcgaatagaaaatccccgtgaagccatcaaggacggttctacggggattttttgtctgtcaataacgtgtcaatatggactgcttaccgtgcaccggttatacaaatttgcaccattttgtaccatttctttaaaatcaaaatttaaacaatcgagtaggagataattgattagttcaattatcgacctctcacaccaccgtacgtacggttccgtatacggcggttcgacaacttaatcacattgaattgactggagcgtcttggacatattcataagtccgagttgttccagttttctattagttagagaatagctcaaggtcttactgtgtgcagttcgccagtagcccttgcgggtactagcgaagacatatgcatcacgctgggacagccccagcttctgtaagttagttaccttagttttaagcttcttccattgcttccagatatactgtcttattcggaccctcaaccacttgtcaaggcgttgaataaagtcagttagtttcccaattgagtagtactgaagccatccacgcatttttcgctgaatttcttcaaacattcttgtcagggatattccacgattacgtttagttaataacctcaatgctttctttactcgttgttgcgattgtttagctggacgggcgtaggctccattgtggtctacacccaacgaaaagccaagaaactttaaccgtagcgggctaccgactttggttttatctgggttcactttaactttcaatcgcttttcaagaaactgggtaatgcttcgcattactcgttctccggctcgttgacttttaacataaatgttacaatcatccgcatagcgcacaaagtggtgaccacgtctagtcaactctttgtccaactcatttagatagatgttcgccagtagtggtgacaatggccctccttgtggggttccttttccactcttagcgaaaagcccatggtctaagactccgctagttagaaacttacgaatgagtcttagtgtccatgggtcatcaatatattgttggagatacttaatcatcaagtcatgattaacgttatcaaaataggcttttaggtctaagtcgacaactcttcgataaccttgattataaagatctactacttttgcaatagcgtcgtgagccccacggtgagggcggaagccaaaactattatcagagaaaacacgctcaaagataggtgtaagaatttgggccacagcttgttgaaccattcggtccaccactgttggtattccgagttttcttactccaccattaggcttcggaatttctacccgtttgactggtgctggtttatacttgccctcacgcaaactagcgatcaactccgtcttattttctctgagatatggcagaaggtcattgactgtcatatcgtcaatgcctgctgcccctttatttctcttaactcgcaaataagcctgattaaggttattgcggtccaagactaagtcttggatagtgacactcatacctttaccttcaccataatcggtactacgcgcccttgtgtactttcggttttccaaacctatcctcgacaagcggtcagcttgttgttctgttttctgcgattgtcgcacctgattacacctccgatataagttacaagttattgtcgttcagtccttcatctgattactcagactactatgacctcggctgacttctggcttactcaacgctacatcactgcaccgcttgtttctgtggaaattaaacttattcctcttgtcggaaacgtgtaggccagatctccccgggtaaggatattaactttcgtaccatgtcaccggtagctttactgaaagtaacttcgagtagtgttggactttaacttgtcatgcagtcttatccagttagttccagccttatagctacttcttgttcatcggtgcagtactttgccttagacttccttcagattccacctcacagtggacacccttgtcctcagctcatggttccgactactacggcccatagcggactctcaccgcctagctaatacccatgccgggcgcacaaaaaataggagaaagcctgctataacaagccttctcctatttcattagcttagctgacaattttgtaccaaagtactaatatgcctccggtgggcaaaactcttcctattatattaggctttaactggtctttgtgtgatttttgtgtgttcgtaaaaaaagccctagtgactatcgcaaattatgcaataaccactagggctaattaaatttttacctatttaaacgtaccgaacggctggttattatttgcatcacggcaaacaagataaccgtactgagcgtttggtcgtggctgacgaagccatacatagccatcgtggcgagaccaagcgtcatacttaacttcactattagctggtaaggtagcgattaaggcactgttagtcttagcaccccaccgcaagttaattgcagtgccagtaataaatgtcccgttttcagcaaaccaacgatcaccaagatcatcaacccaatggttagttggaagttcagtggtaattgctggcttttcttgttcaattggtttgtttggctctggggctggtgcttcgcttggattaaataggttgattgcattatcggttaatgtgatagagccatcaacattgtagccaagcaaattattggtatgttgccacatatcaatatagttagctgacgggaagtaattaaagtctgggttcttccctgctggcgttccattgcgatatacatatgcagctaaccagaacatatccatatggtgatggattgactctaagtcaaagttaggcaacagatacttatacgtatagaaaccagtgtgataaccggcgttgcgtaaggtatttaagaacacatttactgatgatgttggcatgttagaaatttcagcatcaagaatcattaatgtaccgggttgcacatttgcctgtgccttagaattggcgataaagtagttggcttctgctaccgcttgtgcatcattatggaaacggccaaagtgatagaaagcataacccctaattccaccacctgcgcttcgatcaatcagcgaccggatgtaaggattaacatagttcgtgctttctgttgtcttaacaattgcatagtcagcaccgatgtttttgtaatcattaactgttaagtgactctgaaaactagctaaatcaattactgtctttcgttctgtcattactttttacctcctttatatttaccaagaaaattgtacttagatgggtcataatcttcttgatccttagctaatttggcttcaaagaaatccatgattggtttaggcaaccaccaccccatctctgtccaattttctacaattgaaattaaatattgataaatccaagcaattaaaaaagtggtagccatcgtgcttgctccaatcgtataaagatatggataagcaattactaccactaaataaattactgtgtgtttaattatcccagggattccaactgaactattagttttcttaattgttttctttgcataatacggtttaatcattcccgtaattaaatctacaatcatcacgattgtaaaagcccacattagtttatcatcaactaatgtctgcatttggtgcagcataaataaatgatagggcaatgttgatcatctcctttgaaggtaaaataaaaacgccctgagtaggacgtattagtttttttaattgttaattttcctagtatatgcataaatgggcttttttatttgtttgaataaattcttcagtactattaataaagttaaaattataatttgaatcaaaaacgaagctacaacattctttacagtactaaaatggctgcttaaagccaaaatacaattaaacacagcatacgtgtagcccatgataaataatgtgtttttaccataaaactctaatatcttattctcttttaacaatcgcgcaatttgcaagcatataacagtacctattgttccactaataattgttaaaaatccattgccatagtttcttaaattcatgtcaatctcattattgtaagctacagataatacaaaaataacaatcaaaagtaagaaaaccggtaagttaatgtgcttagttaaattatatttgtgtgtaataaagcctaggtacatgaataacactgcaaacattgcaacatcaatattccacggtaacggaattttaattgtaatcgagtaaatataactcaatatagctaagattccaaacactattaatggatatttaaaattaaattttagaaccacaaaaaaaataatctctgcaataaataaggctgttagaaaccaaagtggcgaactccaggccatataattaggacctccacgcgagtatagtaaacctaaaacatattttgtagattgaagcatatactgtttactaaacccttcagcaaatagtggataaactatgccaaatagaagcaaacatatcaaccccattctgaaataaggtaggatatattttttagctttatattttataaactctttataagaaaaatacctgtatttagcaaagttgaacaaatatcccgaaacaaaaaagaacagtggtatatgaaaagaatatatgtacttttttaactcaaaaggtatcccagatatatgacccaagacaactagaaggatgctccccccggataatatcaagcgatttatctctcactttagttgtcacttttatatttcctcccaataaaaagaataattccagtatactcttttaaataataaaagtctataagccgcccattaagtttccatttaagcaatgcaactttctatgtattgtgtatttataaggcgactatgttttgctactcaattaaattactgaaaatagttgctacatcactatctagcagactgtggggattaaatttatttagccaaatatgttgcctactttgtgtaaagctcatatacatctgaccatcaatattttgagtaaatgggtagaagcaatcttgtactactgctgttgctacttcatagctcttttccagaacattctgatcaatctgcatcaaactaatatgattacggtctagcggtgaatgaacaaggtacaactgactattattctcgaaaaagtcatagcgtgattgagtatctggtacaagaatcggattcgaccattgaccattagggatattatacttagctaaaactgcattaccttctgtccctcgctgacgacaaaaataataaacattgtctcccttaacatatacagaaggttcaaattctggcttgtacataaagtctggagtactgacaaaagtccagttgattaagtcgcttgattttactacaaagcaaaaatgtaagattccgatacctgcatagtattgcactacgccatcttcaatccgtggacttaatttttggacaaaggaaatatcacgatcttcataatcatagtcaattcctgccttagctaacaaatcatgaacgcttactgtatcaaatgtcgacgtcattactccaactttaaaattcattgtatgaatatcgctcaacagcttagtcttaggatcaaaacgacggtaaagcatatagaacttaccacctaccttagcagtaaaggcatagatcatatatgaatcatcacttgttttaagaagcaaagaatcgtatattgcttcaatcttttgaccattatattcttgtccaatgtcggctacatcgatgtacgtttgttgatttagattctcaaacggtgcataaactaatcgtgctgtatgctgggttggatcttcgtaagccgatcttgtattagcataataagacataaaaagagtatcgttaactttataaaacgttgatacatgaaccattttatcgccgcttttagcaaaatccgcaagatgattggctaaatctttaccaagtaatataccattcatataactagaaattaatgtatcgactgtttgttgattcaataaattcttttttattttttgctcagtaataacattaatgtctggaagcttataaagttcagcaatttgtttgggatttacttgttgatcaagattgaaattaactactaattttttggcgccttttggcgttttgataaagacatcagttaattgatcattaacatttgcaggcgcaacattcattaatgtgttttgctcagaaataaatccatataatcgtggattcaatccaccataaccctttattctgaaagcatcattaaaattacaatctaatataatatatttgtaattacttactttttcaggaattaatgagactgtttctcctgtttgataagctaacttgatatttcgatgaatattggtagttaaagcaatattaattttagctaaatgttctttatccggagtatatctatatgctgtacagttactatccatattattgataattaattttgcagcattacttggcgcatataaagtaacctgagattgagataagtttacttcagatttttgaattaaccggttctcgctatcaataaaggcccaagccattgcgttaaagcctccagatagattattaattacgaaaatatcgcccggcttacatacttgattaatatattgaaacgcagacgttactattggatgtgatacatcaacagtttcaccataatcaacattagtgttaattgtatagccttcaattgcttcaatcggcattaaatgttcacggatatataaatgatcaatatcattaattactgaacggtgtcctcgatcgataatttttagcccactattttgaatagtatcgcgtaaatcattttgcttcatagtagcagcagtactagtaatctgaaaccttaccgcagtcgtatccttttcaaatgtatatatcgctttatcgccaacactatcgtgcttaataatctccccatttgaattgaattcaaaaatactaatatattgcaaataatcagtattaagcaaaaattcaaaagcatgtgatttaccaattactttgagtgatgagtatgcacgattaaaactttcgtgaggtgtaattttaccagtatttgcatcaatttcgcctaaaaaccaatttatatcaacgacttctttagtcaattcactgagtgatttttgcaaaatagaattagatgtatcaaggtatgtaaggcgtcgtcgcgtttctggatcaaaggtagtaactgtccatataccttcatctacccatgatccattcttgtattgatacttatgattattgtcattagtaacaaagagtccatcttttccattaggatattgagcttttaagtcatcgagtgatgaaaaactctcaatgttctgtgtcattttactaaggcgattatcaatctgattagcaagattattatattctttacgtgtaattacattacctgcatcaatctgcgcttgaattgcaccaacagcatcagcaagtttactcaacgctgctcttgtttccgcagacatatcctcattcttcttaacttctgcctggtacttttcacgtaattctgctaaagcgtcaataatcttaccattgcatcgctctaatacttcatcaaattcagtaacaaagtaaggaatagcagcccccatcgttggaacaccgccaagaacacggaaccaaacattaacactagtaaagatattaccttgtctatcttttaggccaaagtaaccaaagaaaatacctttttgagggaaaaattgttttggcaacttaacaaccgtaattccatcgtctaaactaccagcttcatctttatcttcccattcaacggtagatgcatctgcagacatcttaaagccagttccatcttctaatttttcaaggtactgtccaactgaacctgtcccaaagaaatgtaatcctcgttcttttaaattaattttagtttcagtcttactagtttcccactggatggctaattccgttccttgatctcctacacgagcattaaattggttaaacatatcaaccaaaaggccgcctcgttcaaatttgtaggtgttaaaggtaatcagattactaatctcttttgccatttatcatcactccttcttaccaaaagaattaaaaatatcatccatagacgatgactttttcttttcttgttgtttcagttcttcttcaatactacttaaatgtttatctaagttttcgaagccctgtgcaattgcctcacgcacatcttttccataacccttgtgacgaatagcgtcagcgatttgtttcatagtatgatccgtattatcaaatgactcataatcataggtttcacttgccattatcatcgcctcctgttgttagtttttctacttgttcctttagtttattgaattcttctaaggaaaccattcctttgcgagcacgatcgttatcatcttgaagatttcttagatcctgtctcatttgtgcaagatcagcactactagcaaaattttgcataaccttattattgttattagcagattgctcttgggtttggacaacctgattaaccatcactcgaatttccttaaattgttgaaaattgacttgattttctaactgataatcagtaagccccatcgtcttatcaccaatcgttaatgaagacgcatggggctttagtaaatcaatttctttttgagtaattcgtaataattggggttttgcaacatttggattaataaacatgtacctatcagcaaccttaaaagatttgaagtttgtcatatgtaattctaaagctgtaacttcccaactttgaggtattctttgagcctttatccatgtttgagcttgttgcattaaaacattcggatcatctacattatcaaattcaacagttccctcaataataccgaattctttttgtaaatcaggaatatcaatatagtctctaccgttattgacagtagtaatggttaatttaggacgtgcagcattactattatcaacagtttgatctttctttccttcttgtggtttagacccatcgccaccttctttaattagttttactggatctagccaaccacctgcaggagaaaaagaatttcgaactgcttgataaaaatcttgcttagttacgccaatatgaacatggtctgtatcacgatatccaattacatcaccagtttttactttttgcccaacactaacaataatattagagggagaactaaaagcttcttgataaacgatattgaatccttccggcgtatgaataaccacaaaattacctaagccacccatagctgatttgatagttaccgttccaccatgaatacaatgcacttctctaccaggatgatctattgatccaaaatccacaccatcgtgataactattttgacgatatccgccatcatttccgaaactctgaacttgagaaaaatgaccttccccaacatcaggaaaaggccatccccatgtaccaccagctgcattagaatgaccaccccaacgtttaatacaagaaatgcatccactaattggctttccaatagctggattaggcgtttgaccagctaaatcccaaacagcagcggcagtcccttgtaaataaacgcggccaatagtaccttttccaaactcttgattccatttatccgctaatgcttgattcggcgccattgatccttccggtgcgctccatgctggattaatggaattactatttgaacaatttttaatccactcacaaacagattgcgcatcactatacgcatcaccgtgtcgataagtatggttaagccatccatagtaagttccttgttcttgaagttcataagcaaagaaccattcaggacttactccagcatttttcaccacatcatataaacgattaacgtccactccccaagcccgaactctcgaagaacgagcggcaaaatcttgtttcatattattaatatcactaccccaagtagcattaatttctgatttacaaaattcttcagggctatctaatgatccagaaccgccctctccatcatcatcacttacatcaacttttgatggttctagtgtctttcccagtggaatcagtcttgtaatcaccttagtaggatcaatttgcatacttgcagacttcatatttttagctaactgaataggagtatcatctttatgatcaaccccaatatccgttaagtagtcaatgtagtttattccgttagcgttgtaagtagtcacaatataaccaccaagagatttaactaatttatcattaatagcatcgctagttttgggataatcaatttgtcgatattggtcatccttattattagtgacatttacattccggacttgaaactttttatagtcaggaacctgtgaattatgaacatcgattaaagtttgtaaaaattctttgggcgtttgaccaacaccttcataaaatctttgggtgctatccatgagatatgcttcaatatcttcaaaaacatattcacgaatgaattgtccgctttcttccatcgactttttaggtttgatagctcgtccacgaaaaataagttcattatcatcataaacgttaacatgagtatgataaggccttacgttgtcccataatggacttgcttgattaaccgtaatagtcaaatcatcaatattagattctttaagcgtgagttttcccgaactaatatgacgattaactcggggatccagtacaataaatcctgctttatctgttggttcattataaccaataattcggtacactaaatcatctcctcacgcttaaattgaaattcaattgtcccgtttccggatagatgcattttattgtcacccatctctaatacaatcgtggttgttttaaaattgtcttgagttaaacctacttcaccaattgaatcgttcttcaaagttatggaccctgtcaattgaaatgagcattcgactggtcgtgagccgatattcttaacattaacatcctgatcaccgttaacattgaatttaactggttgccaaatccaatgatcaaatgcgacatcatcccaataatcggtgccctcgttatgattagtataagcaaaaggataagccttgaaagtaatagttgctgtgagcattcccttttcttggtcatcctcaacctcaacactagtacacttagctgaccagtagtaaacaggatcatgagaatcaattagtttagtgaaaccatgtggcagtaattgccgtttaagctcctcttcgtaagctttacgatcctgataaacttcaccaaaatatacaaacttataagtcaactcacgggtcttaaaaaaacgttcctgatcatacattgagaaatcatattctccttgcatgtaagggacgctttctgtaatttcttgttcttctggcgtagttgctgttcgatcaatcaaccaccaatcataatcagaagaattaaaaccggcaaagtcgatatattctgcattttctaagtattctggatcatcctttgtgggtcctaatccacgaaaagaatagtcattatttaagaatttcatcggctccacctatccttcaatgctgtattttgacccaagcgataatcgtattgatccgctgtatagccaacaagagtgccatcgtcaagaaccattgtcgtgtctttattaagtaattgacgaagcaaagcattattctgcatttgtaactgactatcttgaattgccaggctaccagtataatttgaattaattgaacccaagttaccaatacttgctccaatatcaaagcctggattagtaatagcttgctgaatttgattagccatatcactaacgtttgattgaacttcactgaatccattaatcaatccgttattaagaccattcataattgcttgcccagctggaataagtaacttacggtcataactgattggtcctttatgttctttaatccaatcagcaataccgctaacccaattcttaatactattccaaatggatttcattccattccaaagtgaattcatgatagctctaccagcagcacctaaatctatatgaacaactgatttaatgaaattaacaccttcactgaatagcgatttaataccattccaactactagaagtaatactctttaaaccattcattacaccatcaaagattccttttattccattcaatacactagaagtaatactggcaattgcattccaaacagttgatacaacattctgaattgcattccaagctcctgaccaatcgccttgtattgcagcagtgatagcttgaattattcccgcaataacgttcagcacggtagatataatagtagtaataacgttccataccgtacttacaacaatactgaatgtattccagaccacattccaaatagcaacgataattgccaagcctgtttggattattgtacctagcatcgtaatagcagtagatacaactgttgaaattaattgccatacaacttgaacaatgggtacaagcatattacacacagtttgaaagacggtaacaatcgtaattagggttgccccaatgatagcaactacaccagctacaatcggaacaataattggagctaaagcctgccaaacggctaaaattgcactgataatgctattaaagacattaactaacccttgccaaattggagcaacacccgccacaattgatgtccagattccggtaaagaatgttaataatccttgccaataaggtttaataaaattaactactgcattaatagcattaccaattgcattccaaacagtagtagccactccaaccaaactctgccatactccagataaccacgtagtaaaactttgccataaagccctaccggttttcgtttgggtaaagaaataagttaaggctgcaaccacagctgcaattgcaacagcaataattccccagggacctaatgaggccaccgcactgaatgctttcatcgctccaccagcaatcttagaagttttagcaagtgttgacattgcttcactaaacgccattgccaaattaccagcttttgtaatcacacttaaaccaactattgcagatcttaatgttgtaaatattgaaataaccttatgggctgccataactgcacccacaaagcctaatattcccacaactgctgttttaaaaatatcattactgaaagcagatttaagcgctccgcctataacctttgcaaaattaagaactacaacagtagcattagtaacaactggtccaataacttgaaaagcagaattaatactacccttcatgttgtctaggacttgtgcaatacttccaaagcccgcttgcttaaaaccattgtcaattgccgataacatatttgccagatttttgacaacggcattttttaagtttgcaaaagatgtaccgataccttcactatttttctttgctaattgagcaaaaccattaactccaccattcagcttgataaaacgatcattcaactgatctaccgtaatttgtcctgactgcaaagctttataaaggtcttgttcagcagacttaccagtaaaaccaaatgaattggcgactttacgtaatgcaattggcatggtttccatcaatgttcgataagacattaaatcgactttaccagttgaaagcatttgtgtgtattgttgaagtccacgagaggtatcggcaacactagcaccggaggcaaggaaggcattattcaaggcaatcgccgacttagaagccttagttgcactaccagttaatggcgctaattgttgggcaacacttgtaacgtcttgcaaagaagtaggtaatccatcaattcccttagataagatagcggttgactttgcaacatccttagttgaataattcaaagccttcattactaccggatacttgtttaatgtatcaaaccggttaatggcgccactcattgaatctttaacaacgtcccatgctttaccagcaatcgcaactacacccattgctccagccatcgatttaaaggtactggaaatactagaaccacctgcactaacagtttgagaggttgactgggtttcacggcctaaattattaatcgatttaagcgccttatctaaggttgcgctaaaactctcatcgtatgctgataataccgcttcaactctcattgattgtgacactagccattacctcctctctgtttttgtttcatcttccggaattcacgccaccgcttgacgattagatcatttcgtttcttttcaaggctggccttgcttgttggctgatagtcaggctcatagtgcccacgaacatcatcaacaaatttatcataatcaaaaaattggctaaacttcttatacttcggaattgggtgcttttcgctccctttcgtcgcttgtaccgactgattaaggaaagcttgcaatgctaagtctcgttcctggctaacccgttggaggttataggcttccatccggagctgatattcagccaatcccatttcttcaatttctgaaatattatgaaagcctagataagccaacgaattcaaaagaatttcgtgatagctttgttctgaactaagctcaggaccatctaggcttttagattttttgcaatcggcttagcggcattacttgccttaatttcattcattacccgattaaataatgaatccaagtccttgcaattatcaatataatcatcaattgtatctaacttaatgctagacttagccgcacagtacaacacgtctgccaaagcggccgcatccttagtcattaattggggaagcatcatggctagccccattcctagcttaaccttaactccttggatttcttgttcagcgccccgataagcatcaagttttcgcaaaaacttaactccgaatacaaatgattggtcttgaccattaatttttaacttcataatcttcctcctattcagttgttactgcttcatttgcaccagcaccacgatcgccatcagcaaaagcttcaccttcaccgttgtcgtcatcgcctttaagctgtgccaagccacggaatacatagtcaatttcttccttgatttctggcggtagagtgacccacccacgtttggccacgccatcaatcgtaaaggtcacatcccgagttgaatgatcgtctgggtcgttatcattagagtcttctgacacaattccttgcatatattcggcataaactttgccatctgaccggactcgatcaatatgaaccttccatacttcaatcttcttattaaagtacaaagaatcataaacatcatctgcagctttggaaattgcatttaggaactctacttctaaatctgtttcaatattagaagcagtaggaacattccccatcttcgtagttgttgaatcagtatcccgtttaggatcataacttagtgatgtttgatacgggatcaattgtgccggctctttccttgcattttctaatagtcgttcaaaaagaactgcattcttcccttccaatactggatatgttgccatatttatcctcctttatttcaaatcaaaaacgagtgttaaataaccgtgctttaacacagtattcggaacactcgtatcagttaataattgttgttcttgctcattaggtcgtccttgccaagcataatgtttcgtccgaactgcttgcatccccagacgactaatttcatcaaccatcttagtaacagtcttacgttggttagacttcccccacacatggactattaaagttacccgcattcctgtggctgttttatagttcgtcaaaatcgactggctatcatcaacaaccacgaatggataggtaactggttcatttaactgcggtgggtgatcgtaggtctgataatgcttttggacctgagcaaaaactgcatcataaatttcaatacttggtgacattttctcacctacttaaataacttattcaaatcattagcaaatttcatagactcaattgcaaacgctggatgtaatgtcggtcgtgctgccataaagcgagttccatattcaagatatgggaaatattcagtttgtggagcaaccgttgctgttaaaccattattagaaattgtatttgttacggaccgtctagtattcccggtagggctaaccattgttagcccagcccccttcttccattcgtagtggcccttatacaaattgttcatattttgctgcgtttgctttttgagacctgctccatgttttgcgactatccgtttaactggagtcaaatctttattcttctttaagaaattcgctagttctttagtacctttaacatcaaccttaaaagaattagccactggcttcacctacaatcagcgttgtgccttttaatggtttccgacaggtttcaagacgatacttgataggacaatcatcaatagtcagatatgaccaagagtcatttactggagactccaatcgaattaccttggcgttctgatctagcctgctaaataattcaactaggcgatttgtccctacatcagtaacattggcataccgttgtgctactagcttaggactagtaatcgtgtcttcttctgcatatggattatagccattttcatcttgaaaataaaacttaattatctgtgtttttcgcatttttactcatccccgcataaggattaataaaagaaacggcacctaaagatttaacatctttctggtgtcgtcgtttccacaaatcaatatcatcaaggaaatcatcaaaatctgaagaattaaaagtaatactttccccttcttgactatattgactcatcccttcgttttgcagtcgattgaatcgtcgaactgaaacttctaattcaatataacctagttctccaggtaaattttcgtcttcagttagttctagcttaaatcgcaatgcttggtctgtattatcaatgattagtttcagcaaagcatcacggtcatcatttttaatttcaagcattacttttaagttttgcaaaaccgtattctggtccattcaatcacctacttaccagcagacttagcaccactgattgttgacaatacaatgccgtccaaacgttctgtagtcaatacattagccattgttacaacagtttcgtatgacaaattgttattaactgcatcatgagttacaccaattaaaccagtttcatcagaagtcatgttaaataactgaccaacggatgaaattggagcgtagaagtaattgatattatctgcaactgttgtagcaatcgttccctgtggtacttcagcacttagaataatagtgtcaaagccaaggaaattctgaatgtattgcaaaccaaaggcagattgaacagtaagagtttggttacctaaccatgcatatagatcaagcggattagcaaaggcgacagtttgtgtgtcgtagtcttcccacttaactgaaagttgtcctaaagctgccgccattgccttttgaaaatcgtcaccagaggcggtagtcttgtttgcatcagacttggtaatgtaattaaataagtccttcttaacatccttttgaatttctcgaagtagcttattatcagtatccacgatagcaggtgtagcaccaccagctgactgaatagcttcaatggtagttaccttacgatactttttaaatcctaatgtcaaagtattagctagcttgcgagtaaccttacttaacggaataacttccccttcagcaacattaccatcgaccttagttacttctgacttgtaaatcttaatctgtgaaccagtagtcattggctgcatacgaataactcccaatgcattcaataaagtttggattcctccagagaattgttctacaaagtcgatagattgtgcaactaggtctgtacttgtcgttaaattagtttcagccattttatattcctccttttatttttcatattgggataagttatcccgaatggcttggacccgtttgacgggatccttgatctttgcaatttgttctttagtcattgcagtagcaggagcaccattaattcgtggtgactttccctttaatagttcttgacgaacattttctttaattcggttataagctttaagaaatgcttcaccacgttctttagttgtttctgctttatcagtaacaattaaatcgatatcttcatcagttggattgtcataaccgccatcaattaattgttgcttcgctgtatcacgcattttataacgggccaattctgcttcagcatcttgggcacgtttttcagtttgttgaagcttatattcttgcttttgatccttattcatcttggcaagtttagtagcttcactcttagcctggtcaatttcctcttgcttattcttcaaggctcgattgactcgggctttgacaatatcgtttaattctgcttgagtaaatgtcttttcacttttaccgttatctccatcatcagttccttcaggtgcaccatcattatctggatctggcgttggatcttcagcaaagaattgtaaacgcattggtaatttttcaaacataaatacacctcgtttatagtccggtggactgtaatatccgggttgttctttaacgactgcaacaagtaaaaagtccaaaacaaaaagcactcactaatttgtgaatgcttagaaacccggaagccaatctctgacttctttaaaaattcgatatgcttttttcatcattgagttttcagctaaatattgcagaccttcaaccgttattgacgtattgtggagtccaccaacaacagtaccttcgattttggcttgtgtaaatctcactcctgaaatataaccatgctcgcttaacatttgtagagttcttccaaattgaactttactaatattaaatgtatcagcattaagaatattaggatcaggattaattccattttcataacaatacttaagataacttagtattttgtacgttaccgtaaagaaatcattatttcccattggatcacctactttttatgtgagtgtttttcttttaattgtttagcaaacgtctttttgaataactcatggaattcttctgtcttcttcttttgttctgacgttacttttgaattatcaaatttaacgccttccaaagaattatctcgccaacgtttatcagtaaaaggcttgttactcatctaattcactccaaaccattgtcatcttcccgttatcatcaacgtatgcatcatcaatcctaaacttactatttctggggaataatacttcctgctcattaaaattaaactcagagatatctcttcctgtcttacttgatttaataataacatgaattgtctctttgccctgtccataataaattttagaagttgaaatgtatgatgaatcagtgaagactccaccaatttcaaaattactaataaaatcatccaatgcttcttgtttatcaaagaaataatcacgctggagtggcttgctactatgataaattggcattttagccaatgcggcatctaagttttcaataaattgtttcttatttttagaaatcttattacgcctcaaatcatcattaatcttatatgaatctgaactaatataattattcaatgccgcctgttcatcatcagataatgctatattgcgttgaccatcgacccatgtctcactaattgaacagcgacaattaggatgagtatcgtctggtattttaggaactttattaattcgataaataccatcaccaaagccattatcttgcgtcgcaatctttcgacactcatcacaggctcttggctccgcaatccagtggacaaattgataaccattctttttgattaattcaatctgagcagaatactgaacccgtgctgattctgtcctggcaatacgttcagtaacataactgtgatttttaacagtgacttttactttatctcttaattgtcttgctacaactcgcggattcttaccagttaaaattccgttggtgataaccgtatcaagttgagctttcaaagtatcttgattagcccaaattcgttgactaaaagttgctccattaatttgcttcattacttgtttcgcaacatctttagaagtccaaaacgaactattttcggtagaatgatctagaataccagactgacgttttagctcatcagtataatctttaccaattttagcttgcatatcagcatcaatattcattccggcttcaaccatcgataaaccaattttagatttcaataaattcaatcggttatatcgcatcgccgtattataattcctcaatcgttcattaacttcatcagagaaatcattgtaagtaacatgcttcccttgtgctcttaaacgattagcttcctgaactaccttcttagcttctgtttcataatcagcaatatcggtagtggacacttctttttgagcttcagcataagaaactttattccggacagctaaagaatttatctgatcttcaatgtctttattaatctggacaattgcttgatcataatactgttgaaggcgctgattaaattgagcatctttacttaattgctcttcttgccatttacgttcccgagcaatacgatcagcccaataattattcttcttcgtcatcggattcaccgttcttccggaaaccaactatctctttatcattttctttttgatcatccattagcatttgatctgtagcagaagcagaatgttgaagcgcttggtttatttcttcctgcttctctttttgcatacgctcaacttcttttttaggatcatcaattaaacgactatttcggaatgcagtttcttttgacacaacccctgatagtttttgtaaagtatcagcttcttcagaaacatcaatcggtaagttttgtttgaaatcaaagagcaagtcttgccaggcttccttatctttgactacttgatcagcactaaacactattcgatataacttccggagtgcctgagtaaatttacgctctttattagctgccatatttcgcattggaagtaacttatattgcaaagccaccccagaactattaccagcaaacgcttcatcattaaggttagcaaccatacttacctggtaaatcattgaaacaagccggtcaataatatgttcttgcatattatcaccatctggttttgaaatgaattcgacatcggcattagcagcatcagcattaggcgaataaatcatttgattaccaattaaattagcatccggtctaccatcaccatcctcatctaaatcaagaccaagaattttaaggtaagcattatcaaaatattccacttggttagctttctgtgataacactctgtctaattcgtcgattaaggttttcacattatcaaaaacaccttgccgctcttcatttccataaaattcaactgctggcactaaattatacatattattttgatctgaatcttcaacaacactacctttaaaggttttaattttattagcgtaataaaccattccggtccataagccgctttcagtatctttccagtaacgaacaaaagcaaaaggttttctagcaaccgtatcatcgtaaaccatgaaggcatctgtaggagaagcataagcaatacaagtgtctgcgttctcatcttgataaataaaagcaaacgaacgtccgtagatatccgtttgcttactaatttcactcaatttgtcctggaacgaattagtgtcattccattgctgtaatgcttcgttctcattcttatcatctaaagtaatcttaggtgggattccagtaaagaatccattataagtatcaacaatataatgcggtaaatttgctactagccgattatctggcccatacatccgccgctgttgatctaagatatcgtgattacctagatacatttgcatattatgcttgtaatccttagcatactgaatatttcttctcatgaacgacagtaaatcatgcggatcaagttcttcttcatcagctggatagataaaaatatggccatctaaaatttgtcctttaccgtttactgtttccattcaatcaccacctaaatataaatatttttcattacagttgcctttggactagccattccgttgatttcagataaagcatacctgatagcatcgatttcgtggttgtaactatcgacaggctcattggtgtattcaccagtttgtttgtccttcttgtatgtataattttccaattcctcaatcgttttcacacaccggtcatcaacgactaagtgatattgctgcataaatgaaagtccctgtataatgctgtccttcccctttttagctggacgaatccgcgagataccatcgcgtttaatttcagcaatcgatttaggctcagcagcatcagcagtaataacttccttgctataacccatttgtttaattattcgggcaatatcatcgttcaacataccgtgcttagcgtactcttccatcacgtaaattttacgggtactctcatccactttaacgtgcataaaggctgtttcatcgttagtgtacccaaagtccaagccgaagtacgagggaagctgtgataaggttcgaatacttaaccgacgtttttcaaactctggaaagaccagcttatccaatgtagcaaactcgcccagcgtatagattttatagtaggccgggttggtttgttttaagttctcaatcgttgcaatgttatcagcgtccaaaaagtgattatccttgtaagttgattggtgaattgatactcgttccggattaactttcactttcggatcaaaccattgcttataagtccagttcaatttgctaactggattaaacatacaaaacaattgtcgtttcttatgcttaggttcacggagacgtagggtaagctgcgtgaagtcgtcctgtgtaaattcggaagcttcttccattaccacatcagataaccctttgattgacttaatcttttctgggtcatccatacccttaaacaggaaaaccgcaccgttcggtaaatgaacagtacggtttgatttatttactctacataacgataacaattgccaatttgataaacagtcaattacgtcagcgaagatagattcttgaattgttcgatcaactttccgcagccatagcactttgcggggatgtttccagtgttggagtgatttaagtacaactttctgtaccacaccatgcgatttaccagaagatgcaccgccataagtcagtaccaaacctcaacgaaatgactgtaatcaaacaagttatcaaaaatttgtttattgaaaacgttgtatggtttaggaaaatttagtttgatgtttggcatggtatcaccttcttttgtcttgaccatatgtatcctttgaaagattttatttccccatcacaacagcgatacacacttctacggttgaatccatgtctgtcggcttctctcgctgaattccatacttttaccaaattaccgtttaaatcatattgataaattttccaagtactatggctttgttgtgaaagaattgaccttttctccacgtcaccataattcatgttgtacttgctagtacaccattccaagttatccacctggttattatttttatcttcgtctttatgattaacttcaggcaatttgtctgggtttgggataaaagcttccgctactaaacgatgcacctttttggagcggcggtttaaattaacctgagaatatccataagcatctttcatctgtttaagcaagccgcctttatactcactgtaaacattacctttattgctaaccaagtaatgaggatgatctttgatttttctccattgttcttcactcttcatcatcataatcccccattcccacatcaatctgaacatcaccagaaataacctttttatcagtccaggcgccgtgacgctttccaattaattcagcagctttaatacgatcttttgccgacacttcaacgtcttcataaatacccttagcagtagcaaccgattctgtttgctcaccacgcataactgaagtaagatattccatcacctctgtcatatcagctgttttctcggattgaatttcagcattgcgtttttcgattgcagcttttaagtaaggttttgctaggttttcagcaccagactgcttagctgtcttcttagaatatccagctttaattgccgcctgagtagcattacccgaaataatgtactcatcgacaaatcgttgttgcttctgtgttaatttttgagtaatgctactcacctcctaaaaagtaaaaagtcagccgttaagctaaactaattaaatttatttaaatttttctgaattcttttctatgatgtgtaaagccggtggctgtaatacaaaaagaaattcaggatcgtttatatcttcaacttggctttctcttactataatttcattattaagttgcataattacgtacatattaaccaattcaataacattagtatcgttttgtcttaaatatccttggtgatgttcattagcgtaaagtttctttacaattgccaactttttatcagacaagcctaagatatatttttcgtaatctctttcaactttatgtttgttatacttgtttctaccccattcgtatacttcaactattacttcaattattaatgaggctacaaaaaataaagtaattaaaataataatccaagaaaacttattgtaaaaccatttcatattatattgaattaaaaatggttttaagcataaaagtactattccaaaaataactccaacaaatttagtttttggcttcatactcaaagcctccaaaaatgtttttaagtattcaatcatataaaaatcacccaattaaacataatacaaaagcctagccataatagctagacttcatttgggaagattattatatgaatatcgaatcattcgacaatactattatcacatttctatcatgaattgctcgctcaataatctatcatcaatttatcaatcttcctcgtcaagataaacgtgtagatcatcaatttcagtatgaataccgtgcttaactaactgaaattcaaaccggtccgcaaactcacacagcgctttttcctgctttcgactatacgttgctgaactaatacttagctccctagcaatgttatacgttaacatctgatccgaataccgatttagtaaaatccgttgtgattcctttgtcatattccgcatagcgcaacccacacaatcaacaacctcttctgccaaccagatattcagcattcgattttcactaccgttaccatggctgggagctttaggcattccgtccatccctggtgacttcaaatcaaaacgttgcttccccgataaagccagatagcgatccagcttcttatcaagaaagtcagtaacctttcttgcagttttcagacaatcaatatctaaattcaaacttgtttgcatgacgtaccctcgctatctgatataataattatggttaaatatttttagtgaggacacatcttttacggtgggtccttttttcgtcatggatttttcttacccaataggaacccagcaataaagacaatcatcattaatacaattaaaagtaacattgcctcacccttgtaaattccgtccacaatgaggacaataattaaatacctcaccgtcaactttgattggtacttctgtcttaactgatggatctggagatgctttagtaaccattaacttcttaaatggaaattgacaatactcacagttacttttgctaggaataaaactttgtcccttaaatacaactgtttgcgcattaattttaatactcatgacaattcctccgcttgtacatcaaccggcaccgtaaataacggattaccacttagctcacgaattgtaaattgttcggttaactcattgtgcccgattacataatattttcgatcgctatagaatactggcacattattttcttcatgttttaacgcctcttcaaatgtcattagtaacttacctcctacataaacgccgtacttattataagaattattaaaataatccacgttataattgcaaaagcttccgcaacctgaagaaatgtaactttcctcctcggtttactattagtgaattcttccacatgtggataatgccttttttcgcctaattcaaatgcaacactctctgctttaatttcatcattactcattggaacaactggtattttgataatcttcgccgtcacatttttcatatgcaattcagaactaaaagcatcccatgctgattgataaaattctttcttaccatcagctgctacttcataaacaaacggttcaactggataaacatcagtactccaatcgccacatcttgctttcattagtcacgctcctaacgccaaattttgtaaagcatctcaagtgtcatcagaaaaagaaaaatccatatccagactttacttcccgtaactattgataagacgactgaaacaattaataacagtaaaaaggaagtcataataattttgtcacttaatctcatccaagcatcacctcatcaatgtagttattaagattgattaattttgttgttaggtcatacattgtcacagttggcctgataccatcatcacgagtgctgtaataatcaagaataattttcttagcattatcggcattcttagcaacaacaaagtggctaatatctgtgccaaatacagctacaacgattacttcataaatgtgcattagtcgcacctctcataacttttacggaatatatcatcagctaccacttgataattcccatattcatccttaacaatccaatcaccaatagctagaacgttcatacctataaagaagatgtttttagctaaattaggattaaatacatgcactgaatacctttcaatcatttcatctgacccatcaaactgttcagcttccacaattggtaactttctatatttgtgtagcattacatctactcctttacgctataatcttatttgaggtgaatttaatgactaaatattttagtaatgattttacagggaaagctcctattatttgtccttattgtcatgtatatgctcaatttgattggaaatatgcagaaaaaataaaatcaaaacaatacgaatataatttaatagttgcaaaatgcacttcatgttatttagattctatttggtttcataatcggcaatccaatgaagatatacttatctttcctagttttcctttaaaattaacagctcctaatccagatatgcccgatgatattaaacaaatttatattgaagcggcaaaagtacttagagattcaccaagagcatctgctgctttgtctcgtctggcaatagataaactaacaaaagaattttccaataaacattcattagataatcgtattggtgatctagtatctaagggacttccggctaaattacaacaagcgtttgatattgtaagaattgttggaaataatgctgttcatcctggtgagatagacttaactgataaccaagaaatggcgaaaagtcttttaaatctgttaaatataattacagacaatttaataacacagccaaatcaaattgataagttttataatagtcttcctgaaaaacaactaaagcacatagagaaacgtgactcaaagaaaaattagtttccaaaactttctgctaataatgtgccttctttgctccaatactgaataatctttcttatcggatcctcctttgttccagctccacgagaggttataacctgaattacttcaactaattttacttgttgtggtggttctttttttattttcatatccataaccaatcaatccttcctcaacaatttttactgcatctccagcagacctagcgattccatgaataatttctcgtttagttagcatttcatgaaatctaatttgatccgctctaggcttacctttttcgtttttcacttcaatataaaatacttgatgatccgaccaacgaaatccatataagtccgggtgaccactaggtacaccagctgaaaaaaatcttccatctggtgtttttaccgaaccgacatttacccggaacactgtacactgatgttttgatagtgcaacccggatatcgttttgaattttatgttcactcgtcaatgctcacactcccacttaatcatgcggtcaataattgaatttcctacataaataggatatgcgctaggcaatttaatatcgctaaattgatattttcccttcaactcccaattccgataaagaccacaatctacacgaaataatgcattacgttcaatcagttcatcaagtaattctgatgtgctgatgttttttaattcattcatattttcctccttgcatacactatgcatacagtagtgtatacagcttaattcttactctctcaacggatttagttactgcatacacgcatacactaactttcaactttttataacgcatatatagtatttatatatatttattttttattattaaaatagtgtagtagtgtatgcaaaccttaataaacgttgatgtaataggttttttctgcatacacttaactatattcatagtgtattatctgtatgcacttttctataaccacgatgactaattcctttaattcgccgttgtcctgctttccaatcatgccggttatccattacatacttaatctttttggctaatgaacgattcttaaccagattatcttcacctaattgatgagcaatttctgagctttcaatccagtcatcgtcccaagtactgagaacccgttcaatttgattttcagtttcatcaatgtacataaatatctttcgattatcctcaatgagcttctgctgctccttcgtcaatatgaaagaaaagccttctttgtagaggccaacagcttcaccccaaatgtgattgaccatcgtatcatcaagatcagttaccggattagccattgcttgggacttatcagccatgttaggtaagaaacgccgctcaccggttttatctttcaaataggttgattcgttagtagtccgggccataacaaaattctttggccggcggattgtatgtcgtccatatggtggccggaactctaattcttcagctgagataaatttcttcaaattttcaaagtcagaattatttgtggccgtcatttcatcgtcattaacaatcaatgcccgcagcatattggcaaaattatccttgtctttgaagtccgtaaattggtctgtataccaaccatgggctaactttttaagtaaagtagttttaccaacgccttggccaccaactaaatcaaacacccaatcaaatttactttccggcttatagactttcatcaccgctccgactaagaataattttgtctgcagcgttgttacttcaccactgggtactcctaaatagactggtaggaagtctttgattcgttctttgtggtcccaattcttatagcacttttccatatactctttaaccggattatatgggtggctttttgcttcaacagtgattgccatatttaacaatttttcttgaaacatcaccccatactcatcctcaatgtaacggagcataattgctgaatagctatcatcaagttgccccttttcaataaatagctgtggaatgtccttaacaacatcaattgaataagcaaactcgttatatttgaaggtgccatgcagtagtggatcgccatcaaggattaaaccaatattcttcaaactattagttttaggattgccttgagtatttaattcaaattcaattggtttgcgaattatattatccgccacgtatttcacccccgtttctcaaatcacgtcttagcattgattgaaatgtccggttcacttcttcttctggtagtggatcgggcgtattctcattacaaatcatcgctaattgataagcagactttggttctactccccgaaacaataaagcaccaatcattccagctaagtttttatttcttattcctttatctcccaatccatttgcgatggtctcaagtaagtcagtagttgagttgcgttcacgtggtttaaaaactaaatcatctggagaacttcgccggttactggctcgcatttggttaatattcactactaacgacttaggagccgtaacaatcggcttcttattcagccattggtaaccttctgatggcgcaaccacaacataattattttggtgggcctttacatcaacacctggtaaataaccaattaactgattaactcgcatatctgaacgtttcaaataaaataactgtcggccaccatgcttggtggtttgggttaaagtttccggaaaatattccgctggtaattgcttaattgattcaaaaccatcaatgttatcagcatggttgcggtctatatcaacaacgaagaacttatcagtccgcaacgcaatttgagcatatggatgttctatccagatggtctttatttcttcggcggtaagtggatcacgatcagcaaacttaattagtggacgcttgccagcaattgggaggacgcttaaaccctttgcttgataggctaaggcgtaattaactagatttttcatttttcctccttaatggcctcccagccatacggtgttataagttcactgactcaaatatttacttaaaagggcatttcatcatctgtaacttctggcgtttccggctgttccgcttcatcaaagtcataattacggtatggatattgggggttcttcttgtttggtcgaaccttcaaatccataatcatggtctttcctactgccggtgcaaatgctttagccaagttctcgtagattaaagtatcgtcatcccaaacttcatcgggaatttcaacacctagaattgctgctaacttagaaaccaatcgtaaattagtttctagcattggattgggattacccttagaagttaattcatctaatccaatttgtaagaattctttttggccggctgattctccatcgacaacttctaactcaaagttaagctgttcagcattccaaggagtttcatggttttctacttttgcaactacaacggtatatttaccactttccagtcccttaaatttattaactgaatcattctttggatcaaaaccttcagtagctttattcattgcatctcgtaaactcataattcattaaccttcctttacattttgctttttaattttgttaacaatttcattctgctcttttgtagtagtctgctttggcttatcaaagacgccatttacatgttcaagtacccgtaagattgccggatcagtaatatcatctttgacataatgaattcgtcgatctttaaccatccggatataacggtcaccatagcgcttagtttcaatcactaaatcacaatttccgttaaccacgttgtaatatttctgttttagtgatggtcggtcttcggtgtggccagaagattcatcagttagcatcattaaccggctaatgtaaaccgtattcagtggtaaggcttttagctcagtgacaaatgcttgaaagacggtattaaattgtgcatatcccttgccgtaaggaacatcccccagcgtttctactccattgtcataacagatggcctgttcaattagtgttactacatcatcaatcacatcaataactactgttttgtaaccatgattttcagtaccaagagcaagaataatcttgtctagttgatcaatcactgactctttcaagcttccatcgctctttcggacattctttaattgaatacttggtgcggtgttcatctcactattaccatcggtgttaagaaatagcggacttggaaaacgttcagctagatatgactttccggacattgtatctccgtagataaagtaatttcttggaactcgccgtgccttctgtggcttatttggtggcaaaatactcataatatcaacctcacttcttaataaatccacgctgtttagcgtagtggtaagcccagcctggtttgtaaccttttaatttggcataggcttgtatttctttcagattcttcaattcgtttggacgcttgccagcaacattattcataattgctgacgattgaattttcttaataatcgctagccgtgacttagtaactttttttagttgaacatcatcaacgacttcaatttctttttcttctcctaatgccgccccgcaataagggcaaatatcacttgtacgataaaacgaagcaaaacatatcggacatactgatacaggtttaagcgttgttcctggttgttgtttattttttccgctaccttctaatgtccattgccgctcatcagtcggcagcccgaatcgttcaacatttcccacgtgatcgataattattgcagtcttaccttcccgtggattcattgagcgcattgcaaattgtaagtacaacgataatgattgagttggccgtaacataatgacacaatcaacatttggtaaatctaggccctctgtaaataattctgcattggttacaatttgaatttttccttggcgatagtcctcaatgattttattccgttcttctttgggcgtttttccggaaacggcgcttgcagttatcccatagccattaaatgcattggctaacttaattgcactatcaacgttataggtataggcaatggcttgcattcccgtagcaagtttcaaatagtgcttaaccgcattcccgtagattttaggcttcatggcttttttgattgaatcagtgtcatattcaccagttcgttttacttttaacttggcagtatcaatgtaagaaggagcgtaataatcaactggtgctaaaaagtgatggtcaattaaccaggggactgatttgccaataattaaatcatcagccacatcagtaaaaccctgtccacctaaccgataaggagtagcggtaaacagtaacttataagctttcggaaaagcatcaagaatccttcgatatgatttagccagaacatgatgggcctcatcaacaaaaattatcgccggtgggtccaaattattaacgtgtcgggtaatcgtttgaaccatgccgattttagctaaatccatatttacatcattagctttgaaagtcttgataacctgctggacaatttcttgccgatgaaccacgaacaagatacggttaccctttgccgttgctcgtctagcaatctcggccataataactgtcttccccgttcgtggcggctgttgaaccatgatagaacggtgaccagcacttatagaattcatgatgttatcaatcgtttcttgctgataatcacggagttcaaacattatttaatcaccgtgttacggttagcttttaaatgtgctcctggtacttcttctccagctttgagtgcttggtaaatggcctgcttatctggcttagtagtcgtctcagtaattttgaacttatccggaagcttcttatcactatcaataatggttgaggccttaaagttccgggcactaagtaagtgattttcagtagttattttcttaataccggcatcatcaagaacttcagtaatatatttcttgatccaagtaagtttattttttcggtaagtaatttcttcttcccatgacttctttttgtcggtcataaaatcaatttctgacttcaaatgatctgcccatgaagcaagattgtccaatttggtcttccgatcatccttaattgattccaatgtatcctttagaatagttggatctaagtcatcccgactagcaagtgttttgtagttgtcgtttaattcaaataaattcattagttcttacctcctagaaaaatctgtgcaaataaatcagcagttggatcagtttccaaagtatcaatagttgctttgacaattgaagctgctatcggattagtatgtaaccaattcataatcatggctgctaccgttccgggatccgcatcaactaatgaattagtacgttcgtcacgaatttctgattttttagcagcgaaaatggctacctcctcgtattctggtccaagaatttgtttaattgccttaatcttttcttcgttagtcattgttcttacctccgtaaacattcttagtttcagtggccaaacgctcagctgaaatgcgtaacatcgtagcagcattctccattttgatggccattgccattcgctcttcaggagtagcagcgctttgatagcgaactgccaaattcgatacaaatacacaattatcgccaaccctggcatttaattttgataaattaaactcattcatatataattacctcgtagattatttatttatcggtacgactgtttgcggcagtcgtaccttttttatttagtggatcaagaaccactagcagaagataaactgctaggatcgccatcgctccatcataagagccaatcattgaacaatacatgatccaagcaccaacgattagcgcaattaatttactcattaaactaccatcctttcatttgctatactttgattaactcagtacaaaaggaaaatcattatgcgtaaaatttttaagtttttaaccaaatttaattactatagtaagaaactaaccgactttatggtttgtatcttctgcctcatctgttttacttatttagctctacatattacatatgctgctaatccagatgctgtaatttttgaattccaaaaactcagaatatttgattgcttaattactattctttttctaactggcttcttttcttttccattgtttatccttggctggcttacagaaactttaggatttcaaataagcgaaaaatacttggatgatctttcaaaaatagcaattattctttctactattactgggctattaataactcagaccaaagaacaatttgaatttacagctactttcatttcattcgttcttatttttatggctttttttccaaaagaaattttcaatttgccttctgatgtaattcaaaaattgatacaaaagcggcattataacaaagataaaaaacaacaaaagaaataaatttaccaaagttcatatcacctcctttcaatgtttcttccgatacttttctttcaatagcaatggtttattccgctcatacaataagctgtacaccaatgcatataacaaacacattgcaataattaatattggtaatccaattaccaacgccatttaactgctctccctttctgctatactttgattaattcaaaataaaggtggtgaaaattgtgaaattgaagcaagactgtgttaggtatgttcttttatcattagaaaaacagcaattgcaaatgctttaccaaggttttacagattctcaaattgcaaatgttattgctaatgagacctttgataaaaatgatattgtttataccctttatcagctctactcaggcggtttcattagtgccaaaccatttattaataaaatggttcgccaattaactgtctatgacatcacttggtctgggcatgaactacttgattccattcgagatgatgaggtttggaaacaaacaaagaaagctactaacactctaaagtcagtttccattggtgtccttaaatctgtggctactacggttcttactggcatcatcaaaaagaacactgggttgccactttaattgctccataatttgaaagtctttaccttgataacgagtaaacaatttcttgttttttgaaaatccgctggcttcttttattaggtcagcgtttttcttttgcaaaataaaatcagacgtttgttcaaattgagaaactataattcgtcttccaaaaattccttttacaaatatcggttgtgccatctgttcacctcctaacgtggcaatgactggttccaatcaatatcagcttgatgagacataatccaaggcaatgccttggtcacatttaccttagttcgatgaccttgacctgcattcaaattgataacccagttcttaaagactggaagtgtaaggagaaacattctgacccattccttgtcctttataacgggcaacttactcgtgaattccttgataccgacccatttgtcagtttggacatcttgtttaggcactaagttgtaacattccttaatacgcctgagaacctcattagtaattacttggtaatcttgttcatctagcgatgcttgcattttgtgtcacctctcttagccctttgttccaatatggaacttacgaggcaaaaaaatagtgtcaatattaagatcaaataatttactaatagcaaacatttcatcttgagtaaattgatttttaccattttccttatcacgataagctttgacactaatatttagataatcagccatttgttgttgagtcattcctttaacatgttttcgtaaatcatataatcttgactgcatattatctctcctttccgttccaatttggaacaattatatattaaaaccattctggaacaaatgcaactatttttttcgaaaaagataaaaaatattccatttcggtaacgcaagttatataattagttacataagagaggtacataaaatggaactaagtaaattcattggtcaaaaaatcagaaattttcgtgaacaacgtggcctttcagtagaacaacttgcagacaaacttgatacgacaagagcaactgtgactagatatgagttaggatctagaaaggcaaatcaagatgttttatttaaattagctgaaatttttaatgtaaatgttgatgactttttccctaccagagaaaagaaaccttctaatattatttatcctaaagaaggattagaagttgtttcaattccaatcattggtgaaattgcttgtggcgatccgattactgctgaagaaaatatcgaaggttatactgatgaaatctttgaaaaaccagttcctagtggaacactttttggtcttcgttgtaaaggtgatagcatggagcctaccattcctaatggcgcattagccattattagagagcaacctgaagttgaagatggtgagatagctgcagttcttgttgacgatgataacgaagctactttaaaacgtattaagcatcaaggcaatttagttatgctaatgccagataataaaaactatgatccaataattcttgatgaagagcatccaggtcgaattgttggtaaattagttaaatattcagtgacaatggaataaggtgatccaaatgagtaaaaagagatgcttcatatgtaatgatgccctgggaatgttaaaggcttcttgcattaccaaagatggatatttaatttgtggcaaagatgccaacagacttgatcccaaacgtccagcaaatacttaccgtgttccaattaaacttagcaatttcattagttcccataccgctagtgaaattgaaagtttattagggattcattctaccgtaccttacaaagaacatcctgatttgtataaatcaaagctatctaaagtaactgagaaacttgattcaattgctgatagcgctggtaaaaaagctgatactttacaagcagcaattgacgaaatcaacaaaggcgaacaagaaaaattggatgttattaagcaacagttaaaggatgccaatgtagaaaatctattcggtactaaaaaggaaatcaaagccttgccagacataatagatgtcgatggtggagaaaaaatactttatgctgctaatgctttcgttgaaactaattccattcttgcggtttgtactaataagcgcgtaatttttcttgaccacggcctgatttatggtagtaaatcaactgacattccccttgatatgattaatggcgtttcatattctaaaggtttaatgttgggatctattgcagtaaccaacggagctattacaactcaaatagaaaatatgcaaccctaccctgctaaaaagatggctgagactattaaacaggcagctgcagattttaagcagacatcagcacaatccaattctagtaatgacctttcgcaattaagagaattaaaacaactacttgatgatggaatcattaacaaagaagaatttgatgctaaaaagaaacaaattttaggaatataaggagtcaaaggatgaataaacttttaaaaaacgctttttcctatcttaggaactgtaatgatttaaataacgctctttacaatgtaaaaattaaaaagataggagaaagctaaaaatgagtattttcaatggtaaagatggatttgctaaagacaaagataaatatattaaagaaaatcgtttagaaagtttagatgacgaaattctcgaatctgtaaaagatatagcagttgccgaaaaattaacaggtgcctatcctacttttacaagtaatgatacaaaagccctttttcatgaattaagaataatcaaacagcaaaattggataacaattaagcaaaatcaagaaattattaatcaattaaagaagctaaacaaaagctaaatttctcgtccaactaaattgatgacgtaaaaagctatttaaactaaaaaagcccaccgacagcggcaactgtcagtggaccaagggttgatattaattgcgtccaaacaaattctatcaaccctttcattatacacaatttaataatggagggacaagtatggctcaaatatataaaagaagcggaaaatggtctgtaagaattcagtggaaagatactgaaggaaaacgtttttcaaagtccaaagctggttttgcaacaaaagcactagctaaaaagtgggcagctgaaatggaaactaatcttaatcgcggaatacacattgagaaaaaaattgcttttagtgattattacgaagaatgggttaatacttataagcaacctaaaatatcaagtgtaactctgaatcgttatattataatcggtaatctaattaatgattatttcaaagaagcttctattaaagaaattaaccgttctaaatatcaagaatttattaacaagtatggagcaactcatgctatagcaagtgtaaagaagcttaattcaataatacggtcttgcgtacaatctgctatccttgatgattatctgcttaaagattttactaaaggtgttactttagctgccaatactagcaaaacaatgaaggtagaataccctaatgtaactgaaataaggaaattattaactactacaatcaatggaattactaatagaagatatacaagccgttatatgatagtcactgcgatatatactggaatgagaaaagaagaaattcaagctcttacctggaatgatattgatttcattcatcataccattaatattgataaagcatggagagaggtaaaaggaagagacgaaacagacgaacattttaatacacatcgctttaaacccaccaagaatgaatcatctacacgtaaaataaaagttaatgaaaaactactattactacttaaacaattgcgcaataattcatcaagtaaccttgtttttatggatcaatttaatactatccctactagtacagcattaaataaaacgcttcgacaaattatgagtgatacaaaattatcaaagaagaattttcatttccatagtttacgtcatagtcacgttgctttactgttaagtaacggaatagatatttatgcaattagcaagagacttggacataatgatatcacaaccacaatgaacacatacgcctacttgattgatgaatataaaagtaaaactgatgacaaaatcgtccaggcacttagtcaattttaatgtgtgatttttgtgtgttttcatcacaaatttgcaccattttataccatttctttaaaatcaaaatttaaactaaaaaataggagaaagcctgcaataacaagctttctcctatttcattagcttagctgacaattttgtaccaaagtactaatatgcctccggtgggggtcgaacccacactccctcaacgggaactggattttgagtccagcgcgtctgccaattccgccacagaggcatcagctaactaaaaggtggtaatcggatttgaaccgatgataaaggttttgcagacctctgccttaccacttggctataccaccaaatagttaagattaagtaataagcttaatcaaaagggcggtatgtgggattcgaacccacgcgtgccggacccacaaaccggtgtgttaaccaaacttcaccaataccgccaaaatattcagttaagcagggatagtaggaatcgaacccacaatgacggttttggagaccgtagttataccgtttaactatatccctataaaatgggggagagtggattcgaaccaccgaacccgaaggaacggttttacagaccgtcgcgtttagccagacttcgctactcccccataaatggcgcgggacggaatcgaaccgccgacacacggagcttcaatccgttgctctaccaactgagctaccgagccattgtgtcatgggtatatacaactattaagttgtaatggaggatacagggctcgaacctgtgaccccctgcttgtaaggcagatgctctcccaactgagctaatcctccaaaagtgacccgtgcgggatttgaacccacgataccagcgtgaaaggctggtgtcttaaccacttgactaacgggtcatattaacggagagtaagggattcgaacccttgatacaggctttaacccgtatacatcatttccaatgatgctccttcggccagctcggacaactctccaatatccaagccctggcacaattaagaccaggtgccaaagcttgattttgcgtggcaacgtcctatcctcgcagggagcgatcccccaactactttcggcgtgttgaagcttaacttctgtgttcggcatgggtacaggtgtatccttcaagccatcatcaccacactctttgtcccttcggacgagagcttgtgctctcaaaactaaatcctatctattctcttccaataaaccttaccgctccttggttaagtcctcgaccgattagtaatggtccgctccatgcctcacggcacttccacttccatcctatctacctcatcatctctgaggggtcttactttcccgaaggaaatgggaaatctcatctcgaggcgagtttcacacttagatgctttcagcgtttatctcgtccatacatagctacccagcggtgctcctggcggaacaactggtacaccagcggtatgtccatcccggtcctctcgtactaaggacaggtcctctcaaatttcctacgcccgcgacggatagggaccgaactgtctcacgacgttctgaacccagctcgcgtaccgctttaatgggcgaacagcccaacccttgggaccgactacagccccaggatgcgatgagccgacatcgaggtgccaaacctccccgtcgatgtggactcttgggggagataagcctgttatccccagggtagcttttatccgttgagcgatggcccttccatacggaaccaccggatcactaagcccgactttcgtccctgctcgacctgtctgtctcgcagtcaagctcgcttgtgcctttacactctgcgcatgatttccaaccatactgagcgaacctttgggcgcctccgttaccttttaggaggcgaccgccccagtcaaactgcccacctgacactgtctcccagcacgttcagtgctgcgggttagagtggtcatattgcaagggtagtatcccaccagcgcctctgtcgaaactagcgtcccgacttctacggctcctacctatcctgtacaagcagtacaaacactcaatatcaagctacagtaaagctccatggggtctttccgtcctgtcgcgggtaccctgcatcttcacagggatttcaatttcaccgagtctctcgttgagacagcgcccagatcgttacgcctttcgtgcgggtcggaacttacccgacaaggaatttcgctaccttaggaccgttatagttacggccgccgtttactggggcttcaattctgagcttcgccgaagctaacccatccttttaaccttccagcaccgggcaggcgtcagcccctatacttcatcttacgattttgcagaaacctgtgtttttgataaacagtcgcctgggcctattcactgcggctggccttgcggccagcaccccttctcccgaagttacggggtcattttgccgagttccttaacgagagttctctcgctcaccttaggattctctcctcgactacctgtgtcggtttgcggtacgggcagttaactactccttagaagcttttctcggcagtgtgacatcggcaacttcgctactttaatttcgctccccatcacagcttgtcaacacggatgtaaacatttgactcacatcctgacttactgcttggccgtactcttccagtcgtacggtttgcttagcctcctgcgtccctccatcgtcaaacgcagttaactggtacaggaatctcaacctgttatccatcgcctacgcctctcggcctcggcttaggtcccgacttaccctgggaggacgagccttccccaggaaaccttagtcattcggtggacaggattctcacctgtctttcgctactcataccggcattctcacttctaagcgctccaccagtcctcacggtctgacttcgccgcccttagaacgctctcctatcacgtgcacatagtgcacatccacagtttcggtaatatgcttagccccggtacattttcggcgcaggatcactcgactagtgagctattacgcactctttaaatggtggctgcttctaagccaacatcctagttgtctatgcaactccacatccttttccacttagcatatatttagggaccttaactggtgatctgggctgttcccctttcgacggtggatcttatcactcatcgtctgactcctgagtataaatcgatggcattcggagtttatctgaagttggtaacccatgacgagccccttgtccaaacagtagctctacctccacgattctttacctcaaggctccccctaaagagatttcggagagaaccagctatctccaagttcgtttggaatttcaccgctacccacacctcatcccagccattttcaactgacacgggttcggtcctccagtgcgctttaccgcaccttcaacctggacatgggtaggtcacctggtttcgggtctacaactacatacttcttacgtccatttaagactcgctttcgctacggctccggtttttccaccttaaccttgcatgcaatcgtaactcgccggttcattctgcaagaggcacgccgtcacccattaacgggctccgacagcttgtaggcacatggtttcaggaactatttcactccccttccggggtgcttttcacctttccctcacggtactggttcactatcggtcactagggagtatttagccttgcgagatggtcctcgcgggttccgacggggtttcacgtgtcccgccgtactcaggatcctgaacagagagtgtgacgtttcgtctacggggctttcaccctctatggcacagcttcccaactgttgcgactacgtcgcactttggtaactctaatgttcagtcctacaaccccaacaagcaagcttgttggtttgggctcttcccttttcgctcgccgctactcagggaatcgatgtttctttctcttcctgcagctactaagatgtttcagttcactgcgtctacctcttgctagctatgtattcactagtcaagtaatcagcgactaagctgattgggttgccccattcggaaatctccggatcaaagcgtacttaccgctccccgaagcatatcggtgttagtcccgtccttcatcggctcctagtaccaaggcattcaccatgcgcccttcataacttaacctaaacaatcaaagattgtctgattaattgagttagcgattataattcgttaattaaaactcaaataacgcggtgttctcggtttattgttttgttaataaagaaattagatagtatttagttttcaaagtacaaactctatcaaccttatggttgataatggagaataacggaatcgaaccgatgacctcctgcttgcaaagcaggtgctctcccagctgagctaattccccatatgggcctaaatggacttgaaccatcgacctcacgcttatcaggcgtgcgctctaaaccagctgagctataggcccaaataagcgtcttataagttaaagttttaagaggtaaacctctcaaaactaaacaaagtttctccgatgtgtaggttccgttttattccttagaaaggaggtgatccagccgcaggttctcctacggctaccttgttacgacttcaccccagtcatctgtcccgccttaggcggctccctccataaaggttaggccaccgactttgggcgttacaaactcccatggtgtgacgggcggtgtgtacaaggcccgggaacgtattcaccgcggcatgctgatccgcgattactagcgattccgacttcgtgtaggcgagttgcagcctacagtccgaactgagaacggctttaagagattagcttactctcgcgagtttgcgactcgttgtaccgtccattgtagcacgtgtgtagcccaggtcataaggggcatgatgatctgacgtcgtccccaccttcctccggtttgtcaccggcagtctcactagagtgcccaacttaatgctggcaactagtaacaagggttgcgctcgttgcgggacttaacccaacatctcacgacacgagctgacgacgaccatgcaccacctgtcattgcgtccccgaagggaacgccttatctctaaggttagcgcaagatgtcaagacctggtaaggttcttcgcgtagcttcgaattaaaccacatgctccaccgcttgtgcgggcccccgtcaattcctttgagtttcaaccttgcggtcgtactccccaggcggagtgcttaatgcgttagctccggcactgaagggcggaaaccctccaacacctagcactcatcgtttacggcatggactaccagggtatctaatcctgttcgctacccatgctttcgagcctcagcgtcagttgcagaccagacagccgccttcgccactggtgttcttccatatatctacgcattccaccgctacacatggagttccactgtcctcttctgcactcaagtcgcccggtttccgatgcacttcttcggttaagccgaaggctttcacatcagacctaagcaaccgcctgcgctcgctttacgcccaataaatccggataacgcttgccacctacgtattaccgcggctgctggcacgtagttagccgtgactttctggttggataccgtcactgcataaacagttactctcacgcacgttcttctccaacaacagagctttacgagccgaaacccttcttcactcacgcggtgttgctccatcaggcttgcgcccattgtggaagattccctactgctgcctcccgtaggagtatggaccgtgtctcagttccattgtggccgatcagtctctcaactcggctatgcatcatcgccttggtaagccgttaccttaccaactagctaatgcaccgcaggtccatcccagagtgatagccaaagccatctttcaaacaaaagccatgtggcttttgttgttatgcggtattagcatctgtttccaaatgttatcccccgctccggggcaggttacctacgtgttactcacccgtccgccactcactggtaatccatcgtcaatcaggcgcaagcaccatcaatcagttgggccagtgcgtacgacttgcatgtattaggcacaccgccggcgttcatcctgagccaggatcaaactctcatataaaatatataagaacttgaatagctctcaattatctttgttattaagcgaattgacttcgcaaatgttttacttcaaatcacatcgtgattgaagaccctacacatttgattcgtcgaaactttgttcagttttcaaaggtctacccgttggctaatcaagcagccaatcaacatttttattatagcatatatcagattagcttgtcaagaagaaattttaaattatttttgattttcttttgatcgataactcaatcagcaactttattaatatatcatgttgtcaaatctatgtcaacaattatttttaacttttttgtcaaaccatctcaacagcgcttaactgttttgacaacgataattactatacatgggtttttattccccgtcaactgttttttctaaaaaaattaaaaagtattctcaaggtcatataaacagttaaaaacttcaatagcaactaggtcaatatcatcaaagcgaaaacgttcataagggcgatatcgaacgaagataaattcttccctactatggatataagttacatcacataatggaataccaaatttttcaaatgttcgtttctgtcgatctcttgaatcatcgttttgcatcgcaatcaaacgtttaataatcactaataattctgattctttcacaatgataatcctccttcatacaaataaaggatcgtgccttcacacaatccctttttctatctttttactttatcaggttttataaatacagctacaattccggcgaacattccgaagtaatatgtgagtagtcgccataagatcattgctaaaatcaattttgtatttgagtgaataaaacttgcaaagagaacggaaaaactatactcggctccccccgcccctcctggaattggaaaaagcgaaataatcataaaaattaacacgtgcaagctgagcaccatcacaaaattaatgtggtcaattccaagtgcaagcataataaagtatgggattgcatagtaaaagaataattgaaaaatagttactacgcaaaccttaagcagcttcttataatcttgcttcattcggagactctcttggtaaaaagtatccactttttcatttaagacaactttcatgtgctcatatcggttagccttcataaaaatggcagctggtttgataacgaggttcattagtctcttagtaaaactataccagtacatcaccatcagtaatccgacaattaccgctaaatgaatcaaaaagccaaatattactaataatgaaagagcatggagtttctccgcaataaaatgaaagccaattaacaagctgattaagaagttaacaacaatcattgcctgaaatacaacaaacttcattaaaagaactgaacttgctaatcccccatcaacacctgattgaatcattgcaactaattgcgctggttgtcctcctgttgagaatggagtaattccattaaatagttgttcgattaatggtaatcgtaatgcatccttccaggtaaaaccatcgtgacgatcattcataaaaatctttacgacaaccgcctccaaacctaaatataaacaaatacagccaagtgcaacgagcatccatccccaattaatggcagaaacatcctgtaacaataggtggatgtttgagttacgtaatgagtagccgagaattccaactccaataattagcattatgcttaatactaaccaatttcgcctgctcactaagcatccccctttcgcgcttgctcctgataaaacttagtccaaacatctgctaagtgttcttttgagtattccttagcagctcgctgggcctgagtttgccaatgtgccagtcgtgcaggatcattgcgtaataatgtcaacttcatttgcatctcattgacatctttagcaggctcataatccccttcaacaatagaatgataaaggtcaagatcgcgtaacattactggtgtcccacagctaaaagcttccaagacagacattggaaatagttcattatatgaaggtaaaagaaataggtcggcaagattattcagttcagcaatcttatcccgtgaaacgattcccgtaaaatgtaaattagctggtggattatctaccaccttttttaattcactataaccatctgttaaacggccaaaagaaaatccgccagcccaaaaaaactcaacgtccggattttggcgagcaagacgaataaagtctggaactccttttcgttcttgaacctggccgcttcctaataccacaaacttatcggcagcaatcccatatttttttcggagagcagttcgcttaacagccgaatatggatggaaacgatcattatcaacaaagttaggaatataggtaatctttttttcaggaatcccatatgctactaactgcttgataaaagagggattcacaactactaactgatccattcgtttataaaaggcaataatgtaatgataaaaaagcccgcgaaacggttgcgggattgtaagacttccttctaacgtctcgggaagaaaatgcacatagccaatctttcgaccccgcttttttgaaaaagttgacaggtaaaaaagagggtcgattgtatgataatgactgatctgactcttcccataacggttgatttcaatttcaaatttgtcactgcactggttgcgcaacaagttaattaattcaagataggcacttcctactccttgtcccgcaaccttatctgcagatgaaaacattgttattttaatcatcattagctccttgggcggtgaaaaagacgatgtgatttttcagcttgattaagttcatcatggacagccatatctttttgacaatcctggtagaactgaacaaccctttcaacaaagacctctgctgagatctcatgcagcttttgttgtcgtctcacccttgattctgagttttttggttggttaaggtaaaataggacaccattaaccaagtcagcccgtttttgaaaactaatgccaatcgctgggtcatcaatcaattggtcagtatattcactacgcataaccacaattggcaaatccgaggcaagggcttcatcataagtcagtccttgtgattcagaatcggaggctgaaacaaaaacatctgccatttggtaataatggtaaacttcatcatttgatatctcaccagcgaaactaacattgtcattaagctgcatttcacgaacttgacgctccagagtatgtcttgcgggaccatccccaacaatcagcagctgtgcatcaggcttgtgagcaagaatatctggcattgcttctatcagtgagtggatattcttttcatatgctaaacgactaagcgaaagtaaaactggggtctcttcactgtagcctaactttgcccttaaattagctatttcttctgctgaatctcgtttactatatacccgtaaattaatcccagtcggaataacacgaattggtgattcaacatgataactggttaaagtatccaaaacacggtcacttggagcaataatcccagaaatattttttaaataaagatgagcaagccgggcaacatcattcggcttaagaatatggccattcgcaatatagtggagataatcctgatacatcgtatggtaagtatggagacaagggatatgcaaatgcttggcaaccgtcttccccataactccaagcgcaaattcagtttgattatgaactatatctaattggaactttttagcaagcttgatggctcgaaatacgccacgcaccgcaattcgacgatcagaaaacgaaacaaagggaatgcttgcaaagcggtatatcccattttcaacatcatcatgtttagccttaggatcagttgtcgtaaaaatatatacatgatgtccctgagcaatcaattcatcacgaagcgtcttaatcgaagtcgccacgccactcacctgagggaaatatgtatctgtaaaaataccaatattcaacctaactgctcctttttcatcataagttttctagataataattagtcataactgctattatactaaagcattcactgaaccgcaaaacggatttaagatattttaaatcttcctcctaatagtaacaagactcgggaagcctgattaagatttctttacaaaatcttttaataatgagaataaaaaataaccctcttgaaatggtgaacaatcaagaaagttaatttcatttatcaaagttttacctgtggaacatacttttccactaattcttggaccgccacggcagtttcagcatgaatcgctcgatgaactaatggttgtaatttgcgcgtattcaactggttaattaaagagcgaacacgtaaaatctgactactgctcattgaaaattcatcaagccccatcgccattaatagaggaaccgcataaggattattagccatctctccacacattccgacccacttgccttcagcatgcgcagcttcaatcacttgccgcaccatccgtaaaactgctgggtgaagttcttgatataggtatgctacttgctgatttccgcgatcaacagcaaataggtactgaataaggtcattactgccaatgctgaaaaaatcaacatattttgcaaaatgttcagccataactgcaactgctggaatctctagcatcatgccaacttcaatatttttagcaacttgaatacctgcttgctcaagcttttctttttcatcgtcaagaattgctcgtgccgcttggaactcttcaattgttgcaatcatcggaaacataatggctaaccgtccataaacggatgcacgaagaagggcgcgcaattgaggacgtaatatttctgggcgtgccaatccaatcctaatggcacgaaaacctaggtaaggattgtcctcatgaggaagagcaaccatccccagctttttatcgccgccaatatcaagcgttcgcgcgactacccgttgtccgttcatcgctgaaacaaatcttttgtaagcattaaattgttgctcttctgttggcaattcatccttactcatatagaggaattctgttctcaaaagaccaattccctcggcaccatcctcttgagcatcaataacgtcagcaaatgttccgacattagctcccacttcaaatcggcgcccatcagcactcacagtttgcttatcttttaacgctccccacttttgctgctcctggataaatttaccggctaacaaacggtaatgctcaacctcttccttcgttggattgacaatcactttgccatgaatcccatcaacaatcagtaagtcgccatcatgaatgatcgcagtagcatccttgacaccaacgacagctggtaacgaaagagtcttactcataatcgtaaaatgagaagtccgccccccgttagttgtaacaattcctgcaacatatcgtttatcaaattgagcggtatcagtaggcgtaatattattagcaacaaagatcgcgcggtggtctaaaagtcctgggtctggtaaaggaacattcaataggtgactcaaaactcgtttggtcacatcacgcaaggcggttgcccgcgcatataaatattcattatcgttcttgcgctcaaaaatacttaaataataatcttcaacgcgtttaacagcccactcggcggtatcatgatggctattaatacggtcaataatcttcttttgtaaagtcggatcgtctaaaatcgcaatttgggtatcaataatcgtcactgcccgttgacctaacagctcatgggcacgcttagataaatgctgaaattcggtcttgcttaacgcaaaagaatcatgaagccgggcgacctcatgattctcatcagctgtatgctgtttttttatagatagatctgactctactaacaggtgtgccggagcaatcgtaataccactactagcggcaagtccggttagtagtatagacattagtcagtcaatccttccttcttcatagtttcagcaacggtgtccaaagcttctttttcgtcgtcaccattagcagtaatagtaaccttggcgttttgaccaacaccaagggacattacacccatgattgacttcaagtttacactcttaccttcgtatgaaagagtaatgtcagatgaaaactttgaagcagcttgtaccaaaatagtagctggacgagcatgaataccagtttcagaagtaattgtaaattcacgtttttccatattaatcagtctccttcgagcagatataattaatttattatcagtagcttgaccactgatacacctcgataattacattttagcaattgtaagcgttaaatacaaggctacatcttgcgatttatcgctctcttaattgataaataactttaccgcctcgctgcgcttcgcctttaatttgcgaacgatacgcatacgagtgaaaaattggttgaaattgctgaaaattctcaggggtaattacaaaatgatcaatctttttatttcgcaagtcatccaacaattgctcaaaattttcttctgccattcaatcacctcaacataaaattttattttcttattatacacgaaattactttcatctttctattttagcattcatggctaaagagtgctaaaatcaaagtaagctgttttcggtattcctaagtaacttagctatgcggaaaatcgctctttatttaagaaaatatttaagttttatggcttgctttgcgataaaaagtaagtataatattaatcaatggtcaagaaaggtcaaaaaattcttgatggaactatttaggaggtattaaatttagatgcaatgtcaatactgtcatcaaaatccagccacgattcatcttcaaatgaattttaatggacaacggattcaaatagacctctgccaaaattgttatcaaaaattacaaaatctacaaacagatatgatgaatggaggtaacggaatgaataatttcggttttggaagcctcgaagacttcatgaacgcaatgaacaatatgcaaagccaagctgctggtgctaatggtcaaaacatgaacggccaatcccaacgacaaggtggcggacgaaatggaaaaggaatccttggtcaatatgggatcaaccttactgatctcgctcgccaaggtaaaattgacccagtcatcgggcgcgacaacgaaattaaacgagtaatcgaaattttaaaccgtcggaccaagaataacccagtcttgattggtgaagctggggttggtaagaccgcggttgttgaaggcttagctcaagcaatcgttagtggccaagttcccgaaaagcttgctaacaaggaaattatccggctcgatgttgtttccttagttcaaggaacaggaattcggggccaatttgaaaaacgaatgcaacaattaatggaagaagttcgtaagaataaaaacatcatcctctttattgacgaaatccacgaaatcatgggtgcgggaaatgctgaaggcggaatggacgctggaaatgttcttaagcccgcccttgcccgtggtgacttccaattagttggtgccactactcttaatgaatatcgaaagatcgaaaaggatgcagctcttgcacgacggttccaaccagttgaagttgatgaaccatccgttgaagaaacaatccgcatcttaaacggaatcaaaaatcgttatcaagattaccaccatgttaaatacacagatgacgcaattgtagcagctgctaaactttctgaccgctacattcaagatcgttacttacctgacaaagctatcgacttacttgatgaagcgggatcaaagaagaacttaacgcttaaaaatgtggatccaaacgcaatcgaaaatgaaatccacacagctgaagcacacaagcaacaagcagctgataaccaagactatgaaaaagcagctttctaccgcgatcaagtcgctaaacttgaaaaggcaaagaaagaagctgaagaaaaccatactgaagattctgcaactgttaccgttaaggatatgcagagaatcgttgaagaacggacaaatattccagttggtgacctgcaaaagcaagaagaaaatcaacttcgcgaccttgataagaagcttgatgaacatgttattggtcaaacccaagcagtggataaggttgcccgtgccattcgtcgtaaccggattggtttgaacaagtctgggcgcccaatcggtagtttcctctttgttggtcctacaggggttggtaagactgaaactgctaagcaacttgcccttcaattatttggttctaaagatgccatgattcggttcgatatgtccgaatacatggacaagacctctacttctaaattaatcggggctgctcctggttatgttggttatgaagaagctggtcagttgactgaacaagtacggcggcacccttacagcttgatcttacttgatgaagttgaaaaggcgcacccagatgttatgcacatgttcttacaaattcttgatgatggtcgtttaactgattctcaaggacgcactgttagcttcaaggatacaatcattatcatgacatctaatgccggaactggtgattcagaagcaagtgttggtttcggtgctgagtctaatggtagtacccactccatcattgacaagttgacaaactacttcaagccagaattcttaaaccggtttgatgacattgttcaattcaatgccctctctaaagatgacttgatgaagatcgttaacttaatgattgatgatgttaataacatgcttgctgataagaacttgcacatcgaagtcactaacaatgttgaagaaaaattagttgacatgggctttgatccaaagatgggtgctcgtcctcttcgccgggtaatccaagaacaaatcgaagaccggattgctgattacgttcttgatcacagtgacgctcataaattagttgctaaacttgatgataatggggacattgttgtcgaagaaactgaagaagtaccaacaattgctaaaaaataattgagtataaaaaacgaggctgaattttttagcctcgttttttatatgctcaatttacttccaaacgacggcggacctccaatactggaagagcaaccattggaacaataataatcgccaatatcaattctgcaagtccattagtcgccatgactgtttctaaagcaattaataaatgattaacatttaccccataagtttgcgcaactgctggagtacgataaaatagataaataaagcctaatactaagccagtattagtaagggctcctactatcgcagcacttactgcggcaatatattttactttgaacaaacgacacataaggataaaagtatagccagctaaaatcccaatcataatgcgcgggacaacggaaacaagcgggttaacaaaaactaagggagcaagcggactacttggtgcaacaaatgctcgcacccaagtcaaaagcccccaaataccaccaataattgcgccatcaacgggccccaacacgattgccgcaataatgactgttacatgaagggttgtaatactaagcggccctagcggaatgttgccaaaaaatgggacaaaatcttgtaagagaataattgcgataaagattgctaatgtcgtattgtgcctaatttgttggtgccgtgtttttgccatttttcttctcctaaataaatttgaataggcttattgtaataaaaaaatcacctattcgcaattctcaagagaaatatggtcgttccttatcgtgtcagctactaaaaagcgctataataatagagaattaaggttacggagtgttaataatgattgacaagtttaaaacaggaaatcctatctgggtttactataatgatatcgattcaggagcaaaccttaccgtcccgcaattattacgcggattcatcggtcaagaataccaaattgaacaaaaacaatttcctaattaccgatacgtaaaaactgaaggtgaaactaagggaacatttgatatgcggcaacgaattgtgcaccttttttatcggaaacaaaattggggagaggttcaatcgattgaaatgtatctccacctcgatgcccctacacaggtatttgacacagctggtggaatgccagtcggtgccccccttcctgctgatattacagttaagtcttttcaccgggttgcaactaagaatggtcagttttggtatgaaatcggcgctgatcaatggattaaatacgatcaaatgcacgttgttgacaatccattcaaccaggatatccggaaagaaaaatcaaaacttattaataatttaacagtgattcccttgaagaatgttcaggccaaagttgattatctccataataagtcaatcaatgtttacgatgcgccttatggaaataaagtggcagagattccaaacggcgaaacaattaccctaattggaaaattaaacgataatgatgagattacctggtaccaagtgggccgcaaaaaatatattactagcaactacattcaaattgaatatccggaagatgatgaataaaaaaagcgagaggttgagaaaaagcaaaagttttttctcaacctctcctatttttacaaacaatagcaaaataacatggaactagcttcgcatcaccacaaggctcaaggctcaagactaatgctcactcacttttattaatcccgccgtaattgaattttattattaaagaatcgcgctaaagcataaacaatgattaagtaaataactaagattacccaaccagtaacgtttgagattatgattgatttaaagacaccactagcagaaagtgcaggaattaagccaaccagtgaataagctaacatcatcaataaaactaggcacgccattggaagcccaattcctacaatccatttccaccgacgatttaataaggcaaaaccattaccaattgccatcatcgttaaagaaaaaccgaagtaccataaaagactatgccaagcagaaacaagatcaaacggtgtattcattaagcccaccagttgtgcgataaaccaaactactaatgtcatcaggaaaagagataaaatccgcccttgccatagtgttttacgagaaataccgttttgaattgcccatttaaagtcagtataaggagttacaaggaaaatcgccattaaaagcacgcttaagattgatgaagcaatgcttggaagggcttggaggctaaccaaaaaagattcaaggttgtgtgaaataattaatccaagcaggtaggttattaatgcaattcccagcccccaacctaaggcaattcctgtagcgtgacctgcttgttgaaacatggttgaaataacaaggtttctcttttgattttccattagtattctcccccattcgttaagtaaatgaataaatgctgcaaatcataatgaccaatcttaacttgatcaggaatcacacgctgttcatctaagcgatcaagtaagtaggcagtcttaatattacccatcatctccgttttaagaatttttaagcctgcagtatactcatcaaccattttttccggaccactaattgcataagccttggctaataaactttctgtatcttcattaataatgatgtggtgttgatccatgattagaacatgttcgactaattgttgaatttcttcaattaagtgagttgataagacgaaggttcgcggccgctcttgataagtcttaactaattctttatagaagctatcacggtgattagcatctaaacctaaaatcggttcatctaataaaacgtaatcggcattgactgctaaagcaacgatcagcttggaggctgtccgttgcccagtcgataagttagtaattttcatccggtcattcaagccaaaaaccttgaggagacggtttgctagatcatagtcaaaattattataagcgacatcggccaagtcaaaggtttgacttatcttcatgtgacgcggataaagattaacttcactcatcaaaaagatcttgctgaggaggtcatcattgttattaacgtcttcattaccaatttttacttccccgctcgttggaaaaatccggttgctcataatattaagaagagtcgtctttccagccccattccggccaaggagaccataaattttagcaggttctaggataaatgaaatattatccaatactgtttggcgacggtactttttgacaatatttttaactattaattgatccatcattctcacctcgttcgattaagtctaataaatgctgcttggtaatcccgagcttacctgcttcaactagcaaactctttacatagtcgttataaaaactttctttacgttgttccataattttttgttgtgcacctttttttacaaacatccctagtccacgtcgcttttctaagaggtctttattaaccaaaatattcatccccttaagaactgtcgcaggattgatatgcaattgctgagaaagctgggtcgttgacggtacctgcgaaccttcatcaaagcccccagagaaaatcatctcttcaagctggtcagcaatttgctgataaagcggcatcgagtcattaaagtcgaaattcataagtgcacctccttttcgtttaacacttcattacttatgtaactaagtatatatgtaaatgagagatttggcaagagggtaaaagaaaaaacttcctgctcggctgaggaggaagtttttaatattattgatctatccatgatttctgataactgtttgtggatccaaccattcaccatggcctgttgcttgactaggatcattccaacttggaacaaaggaattctttaaatcgatgccatagtttggactagtattaattcctaagtgaagatgatcaaggtcacgataaccaattacttgaccggcataaacgatatcgtttggtttaacagtgatcttatcacggttactaaatgcttcctggtaaacatataagtattttccgtcccaaacagttgtaaaccaccatagaactttaccatcatcatcttttaccgtatttacatctaatactcgcccaccatgaactgcatgaacttctgaacctggatgatcttgagtcccaaagtctaggccatcatggaagccattcttacgaatattgctggtataaccaaatttctgtccctgatagtgccaaccttcaccagaccgtggaaatggccaactccaaccgtcattttgcggaagtgcacgagcaatcccatcagtaccaaaatcataacaatggccgtcaacccattgaataccagtatacatttgaccataaagctgatcattgtaaacccataagtcatctgggtcacgttgaacgtcataaccgtctgagaaatagtagcgattaccattaatagttcgccaaccagtagctactttcttagttgcaggatcatcataataaacttttccccagctagtagctactccatttgcatcaaagacataggtatttccatcgatacctaaaaacttagattctgctcgtgagccatcattggtaaagtaaaatttttggcctttaccactggtcatccactgattatcccaacgtgcaccgtcactaccgaaataataggtccgaccccaattagtatagaattggttggtataacgcgcaccatcggctccaaagtagtaggtgtggccccagttattatagaattggttcttatactgcttaccatcttttctaaagtagtaaagcttcccgttttggttcaagaaataatcgcgttgcatccgtccttgatcatcaaaaagatatgttgcatcgccaatagtggcaacttgtgaagttgcccgtactccatcgccaaaaaagtagtaactattgccccaacgattcatccattgattatcccaacgtgcaccgtcttgcccgaagtagtatacattcccccaagcattcttaaacttatcatcccaacgtgcgccgtcagctccaaaataataagtccgaccccaattggtatagaattggttggtataacgcgcaccatcagctccaaagtagtaggtgtgtccccagttattatagaattggttcttatactgcttaccatcttttccaaagtagtaaagttttccattttggtttaagaaataatcgcgttgcatccgtccttgatcatcaaaaagatatgttgcatcgccaatggtggcaacttgtgaagttgcccgtactccatcgccaaaaaagtagtaactattgccccaacgattcatccattgattatcccaacgtgcaccgtcttgcccgaagtagtatacattcccccaagcattcataaacttatcatcccaacgtgcgccgtcaactccaaaataataagtccgaccccaattggtatagaattggttagtgtagcgagcaccatcagctccaaagtagtaggtatgaccccagttattatagaactgattcttatattctttaccatcattgccataataataaactttattatcgactgttttaaagctatttggttgcccagtttcagtaatgttttgttctgaagtatcggtactttgtgcagctggagtaacaggaactgctcccttattatcattaccaactgtgctattactagtactttcagtattgtcgatgacattttcattactagtattagtttgagtctcagtaactgattgttgaacttcaacattactattatctaatgtagaatctgcttgaacagatcctacgcctaaaatcgtccccgcaagaacaactgctacagtacaccaaagtttaccacttttatataacttaaaatgtttctttaattccaagattattttctccctgattgataattatttaactacaactgcaaaacgtttaatattatatgaattttcaaaattacttgctgaaacccagtatgatcctccagcaggatcttcaacgtgataataacctggacgataaccatcaagagtcatcacatgactattattaacacctactccccagaaataattaccatattgaggggcagcccaatgcatcgtgacatagacaacaaccgggttaccattaagtaattgactttgtaagtcagtaggagaagaccctgaaatattctgaacattaccgaaccgtgaaccccattttgctaaaggttcgggataaattgattgaaagattccataggttactcgttgatatccgccaccgaatccttcattaggattaccatttggtgaaattggcatcgttttaataaatgattgaatgttgtagttgttggcatatcccttattatgaagcgcttctaacaaggctgtcgcttcacacgccatatcaccaacttgatattgattaatgtaaggcgcatttaataaagtaccattaattattccactatttggatcaacgtaatagttctgatgtccaagaataaaatcctgcttttgtagggcaccgtcatcaccaaagtaataggtatgaccccagttgttgtaaaagcggttatcccaacgagcgccatcactaccgaaataataagtgcgaccccaattattatagaaaccattatctaagcgacttccatctgcttgaaagtaataggttcgaccccagttgttgtaaaagcgattatcccagcgagcaccatcactaccgaaataataagtacgaccccagttgttgtaaaagcggttatcccaacgagcgccatcactaccgaaataataagtacgaccccaattattatagaaaccattatctaagcgacttccatctgcttgaaagtaataggttcggccccagttgttataaaactgatctttatattcttttccatcagcaccaaaataatatgtcttaccatttctttgttgaaagtaatctgtttgcattattccttgtgcgtcaaatgaatacacatcattattaatttgagctaattgattagtataacgtgcgccatctgctccaaagtaataactatgaccccaatttgtataccattgattcttagaaaggatcccattattgtcataataatatgttttattgttaatggtattgaatgtatttggttttccagtttcagatatctcatctacattattactttgagattgtggtattactggaacttgaatttttccttcatcactagtattttgatccgtaagagtttgattactatctgaagatatattctgcgttatttcaacattatttaaattttgattttctgttgtactatcagcttttgcgaaagtaggtgttactattaatagacctagagcaattgcagcataacaccatttctttccacttttgtatagcttaaaatgttttcttatttccaaaataatccatcccaactgttaattttaattaaacattattatcataatatatttttttaatttgaaaaacttttttcaagaaaaaattatctcttacagaaaagagaagtcgctatttaataacagacttctctttggtaaatttattaagcttttacttaaccaagccattttaaggatgcggtatagtttacaataataggttctccatagtttacattactagtttctacggatgcaagccagaaatcataataatattgatttccatctgcagttgtatacgttttgcttccttttacttctttaggtaaaagactctttacatcattaacagtactttcgctaacatctttacctttttctccagttaaagcttctttgatatcttttgaattcaagataccagaaaacgcattatcacttttatcagttattaaatctccctgctttagaggattatcgattttaatttcctcattgttaacagtattccaaacctgagatattttaatttgtaatggagaagttgctacttgagtacctggttcagaatcaacgactacagttgccgaataatttgcaattaatggttgtccatacttggcatctttatttgcagaaacaaacgtatttaccttattatttccgccttcaagccagtaaatatagtgataccgtgcaccatttgctgctgtgtatacttttgaagatattccatctttaagccgtccagctagcttagttaattcagcattaccaatcgattgaccatcatttccacttaattgagtagttccgaaaaggtctgtcgataactttgttccttcagttaatccatcattaggaataacgtcagtctcattccaaatttttactaattgggttgaaagagatgacttaacatttttggggctttcatatccatttaacattccattataaacgttcaatgattgcagtggatgtccatgatcatcaaataatgaaatattatcccaagatgaacctccccatgcttccttgccatcataatacaatactgaatctggcgcatatcctttggcatactgtgaagcccatcccgaaccataaatgttagacattaatttattatattgccaattattccacccagcctttactgggatccatgctggttcccaataaaaagcaccgagacctttttgtgcaataatcgcattatacatatcctcaatttcgtctacctgaccttgaggatcagcactatatcgatctatattagtagtttcattattttcaccaacggagttatgggtgccatctgcatcgttagtattatttagccatccagattccaaaatcaccgttcttttaccaaattcattccaagccattttttcaatagcttcaagatttactggtgtattagctccgtatccaagatcaacattatcataccacccattgccttgtgtggtactccagaatgggtagtacgaagttccaagataatcataatctacattatttttctttaagacattcataatcccacgatatttattaatttccggagtttctaattgaatagcaactttaatagttggatcaattctccttacagcggaggaaccagcttgaatatatttagcaacttgatcaccatcactggtttcccataatgaagcccagttacctccaccattacgtccagtgtaaaggccaaatgctccattggtaatttcattaccaatttgaaccatctttacagatgcaccagctttttgcaaatcatttaaaattttagaggtgtaaaggtaaacctcttgactcatttcaccatgagataaatttctccaagcttttggcaaaatttgctgtgctggatcagtccaaaaatcagagtattgaaaatctatcaataatttaagaccattatcagatgcttctttagccatttttatgagattttcttcattattgtctccaccagcatatggctgcccctgtgcattataaggatcattccagactcgcaatcgtacccaattgacacctgaatcctttaaaattttaaataagttcgattcttgcccattaaagtcataaaattttacaccagcatttatcagcgcttggtaactcgaaacatcaaccccacgaaccatatcatcagtcattccagggatcttttcaacctttacactatcataacgaagtcctgtgtcagtcccggtcttataagctaagtctaactgttcatctgttctttcacttgcagggaccttactctcattagagttagtaccagtttcttgaccgaatacaagtgttgcagtgtaatttacctttagctgatctccgtatttagcacccttgttaagtgcaaggaagttatttaatttgtcatcagctgattgaccttctagccagaattcataatgataagcatcattaccattatagtaattcttagtgccttctactgcagaagtattacctgcaaaagcagcaaaaattgctttaagaacctcctgactaataattgtacctttatctccttttagaagttcagcagttccattagtcaaagcatttccgagatctgcactattaactacacttcctttagttaagccattatctacgtcaacatttacgccagccttcttaaagatatctgaaatagaagcactaatcgtggaagtagcttgtggttgttcagctttttctcctggtttaaataaaataattactaacttatttttatttaggtctgccccaacaccaagcaccgagttgtctgcatttgtaaagtcataactattcataaaggtattagtaatcttttgaggatcatcatttgtaaaatcagtagaatatactactaaaaccttaccactcagtaagttattagcttgtaatttcttttcaattacatttttatcaggattagtatcaccttgagctacttcttgtgcaatatcatgaagcgctaattcttgataatcgttattggtgtttcgccaatcatatttaacacctttaataccttggttagtcaaagcctgagcaacttccttagctactgtatctctagtttgacccatatcggaagtctcggtcgcttcaccattatcattaaattcgtatcctttaccatcaatgactcttacctgattagtaaccataattccttgattatcaaagtagtataccttaccatctctatttaagaattgatcggtgtaacgagcaccatcggaaccaaagtagtaggtgtggccccaattcttgtaatattggtcttggtacataattccttgattatcaaagtagtataccttaccatctctatttaagaattgatcggtgtaacgagcaccatcggaaccaaagtagtaggtgtggccccaattcttgtaatattggtcttggtacataattccttgattatcaaagtagtataccttaccatctctatttaagaattgatcggtgtaacgagcaccatcggaaccaaagtagtaggtgtggccccaattcttgtaatattggtcttggtacataattccttgattatcaaagtagtataccttaccatctctatttaagaattgatcagtgtaacgagcaccatcggaaccaaagtagtaggtgtgaccccagttatgataaaacttattaacaactaatgatccatttccatcaaagtagaataattggttctcatttgctgttaagaattgattttttaatggaataattccttcattattaatccagtagttaatcccatttatacttttaagctggttttgaagaagcgccccatcattaccaaaatagtaagcacgaccccattttaccatgtaacggttatcccaacgggcaccatctacaccaaagtaatacgtacgaccccaattattatagaagctattatctaaacgactaccatcattttggaagtagtaagtacggccccaattattatagaaacgattatcccaacgagcaccatcggaaccgaaataatacgtacggccccaattattatagaatccattatctaacctagcaccattggcttgaaagtaatacgtacgaccccaattgttataaaattgattacgatacaagtcaccattttccccataataataggtactaccattaatctctttaaaagaattcggcgttgatttctctggaatactatctttaatatctgtattttcagctttaacgttaactggagttgtttgttcttcactattattagatttagtttgttcttgattaatctgttgacttgaatctatatttttattctcatttatctctttttcattagtactattcttgtttgtgtcagtaaaagttgactccgaattagaatcagtatcactagtattatcgttttttactaaagaattattagcatcagaagtagatgtaatagtatctgcatcagctaaaacactaggcgaaccaatagcaagtcctatccctaaaacagtagttgcgattgctgcacaacaccattttttaccatctttatataatttaaaatgcttttttatttccatgacttttccctttcaataacgttttacctaaataatataaatcatcttttaaatcatttcaatcagatacttaataaaaaagcggtactatacattttcaaattatgtataatgcaatgccacttttttattacaattattttatttataagcaactaacttattagcataatcattgatcaaagtttcgttttgttcattattgtaaatagcggtaagttcctttaatggaatagctttctcaacaaatttcgaatgagcaatatcagtagcagtagttggatctacatatttaataagcacttgcccgtcttgaatttccttaaagtagaaccaacttgttggatcacccttagcagtaatgaaactgtagccatcatttacgcccgatgtaacttttccataatacatcgtatggttactcaaacaatccttgaaccaatcagcattctgatatagaccgactaatgttccaagatattgagtataatttactctattaataccatttggaattaatgctccatcttcattaaaaagataattttgtccattaatatcttgtttaccagttacgggatatccattttcatcaaaataaattgtacttccttcatacataagccattgattgactaacatccgaccttcactatcaaaataatgaatatgagtattagaatcatctttatctaagaattggttggtgtaacgggcaccatctgcaccaaagtaataggtattgccccagttcttgtagtaacgattttgatacattactccatcgttatcaaagtaatagaccttgccatctttagtcaaaaattggtttgtataccgggcaccgtctgcgccaaagtaataggtattgccccagttcttgtagtaacgattttgatacattaccccatcgttatcgaagtaatagactttaccgtctttggttaaagattggttagtgtagcgggcaccatctgcaccaaagtaataagtattgccccagttcttgtaataacgattttgatacattaccccatcgttatcaaagtaatagactttaccgtctttggttaaaaattggttagtgtagcgggcaccatctgcaccaaaataataagtattgtcccagttcttgtagtaacgattttgatacattactccatcattatcaaagtaatagaccttgccatctttagtcaaaaattggtttgtataccgggcaccatctgcaccaaagtaataagtattgccccagttcttgtagtaacgattttgatacattactccatcattatcgaagtaatagaccttgccgtctttagtcaaaaattggttggtgtagcgagctccatctgcaccaaagtaataagtattgtcccagttcttgtagtaacgattttgatacattaccccatcgttatcgaagtaatagactttgccatctcttgtcaaaaattggttagtgtagcgagcaccatccgcaccaaagtaataggtactcccccaattatgatagaacttatttgtaattaatgaattatttgcatcaaaataataaagttgattatcatttgcagttaaaaattgattacgtaaaggaattatcccctgattatttacccagtaatctttcccattaacatttaagcttttattctttactaaggcaccatcgttaccgaagtaataggcatttccccatcgaaccatataacgattattccaacgtgcaccatcattaccaaagtagtaagtattaccccaattgttataaaaaccattatctagccgagcaccactaggttgaaaataataagtttgaccccaattactatagaaatcatttttaactagctgtccttctgaattatagtaatacgtattattatttattgttgaaaaagtattaggagctcctgtttcaggaatagtttgttgtgctacatctttattttcagttgtttcaggcttaaccggcgtctgattatcactttgagtatcagtgccagtactattattaccttgtagaggattagtattagtgggagttccagtagttaaagtatctgtagcaggtgtctcattattaggcatcatatctgcatgcgctatcgaccctagactaatacctagccctagcgaaattgtagcaatagcaactacacaccatcttttaccgtttttatacattttaaaatgttttttcattactatcctctcccaaaaagttattacttaattaagtatatacctctatataaaattattaaacctattacaactttgccgttaacttcacatcaggatacttttgcttaaaccaattttcagcaaattggttttcaaacaagaatagtggctgatcatggatatccttgactaagatgtttcgtgatgatgacatcttttcatctaattggtctggatcaatccaccgggcagtcttagttcccattggttccatgacaacctcggaattatattcattttgcatccggaacttgaatacctcaaattgcagttgaccaacagcaccgagaatataatcgccagtagaataactccggtaaagctggacagccccttcttgaactaattgattgattcccttgtggaaggacttttgtttcatcacattcttagcataaacacggacaaacagttctggcgtaaattgtggtaacttttcaaattgaatatcttttttaccattgtaaatagaatcaccaatttggaagtttccggtatcgtataaaccaataatatcaccggcaacagctgtctcaacattttcacgggtatcggccataaattcagtcacatttgataaccgcattggtttcttagtccgtgataatgttacatccatcccccgatcaaattcaccggaacaaatccggacaaaggcaattcgatcacgatggcgaggattcatgttagcctggatcttaaagacaaaaccagaaaattcgggatcaaggggcttaacaacatcctcgtcctcagttttgtgatcacttggtgcaggggcaaactgtaagtaggtttccaagaaagtctgaactccaaaattagttaaagcagatccaaagaagactggtgtttggtcccccttggcaatcttttctcggtctaattcattaccagcaacttcgactagttccatatcatccattgcatcttgccattcaccatcaccagctaatgggttatctcctttaacattaccgtcttcatctaatggtaagtaaggattattttcatcagctgggtgagtcaaggcaacacgttggttaaagcggtcatagattcccttgaactggtgaccagaaccgattggccagttgattgggtaagtttcaattcctaatacgtcttcaacttcatttaaaaggtctaatggttcgcgggcatcccggtcaaatttgttcataaaggtaaagatcggaattccccgcatcttacaaatctggaacaacttcttagtctgcggctcaatccccttcgcgctatcaataaccatcacagcggagtccaccgccattaatgtccgataagtatcttcagagaaatcttcgtgccctggagtatccaaaatattgatccgcttaccttggaaatcaaactgcataacagatgaggtaacagagatcccccgcttcttttcaatctccatccagtctgactttgcaaagttaccggtcttccgtgctttaacggtcccggcttcacgaaccactcccccaaaaagcaagagttgttcagtaatcgttgttttcccggcatccgggtgagaaataatggcaaacgtacgccgtttattaactgcttcagcaagttcttttggtgacattaaatttttcctttcctatatattatttaatttaaatctgggtaatatctctactatattattacaattttttatgaaagtctattcttagaaaaagttacagaaagtttaaagtcttacgatatatttgaacttgatattaattttctgctatattaataaagttagaacttattttattgaggtactttgtatatggataataacaataatcacgaatcacgggaacattaccgtaaacggatggaagaacgtatccaacgtgacgttaatgagcgtaaacggcgagaacgcgaagaagcacataataatcgtgaaaatcgattgcggcacgaagaagcacaatcatcaccagactttcagccaccgcaaaaacaccactaccgaactcctaattgggtacggctcctgattggtctcctaatctgccttgtggttgctggtggattttacgaatatcataaagttcactcagttgccaaaggagtgtttggcgctggtgatggtaagattagtaagaagctgcaaaaaggtgagcctgtctctgttcttacgatgggaaccgatgttggtgccctagatcggggtaacaagggtggtaataccgattcactagaattattcaccattaatccaaagaacaaaacaatcacaatgacgagtattccccgtgacattttagttcgtgtcgaaactagtgatggtccagactatgtcaaaatcaatgcggcttatgcaattaatggccctaagcaaaccgttaaacaagtatcagaactacttgatgtgccaatcgattactatgccgttatcaacatgggagttctcgaaaaagttgtaaactctgttggcggagttgaagtcaataatccatttgcctttgactatgaaggtcatcacttcaaaaaaggaaaacaacaccttaatggaacaaacgcgttgaagtactcacggatgcggtacgatgatccaaataatgactacggtcggcaaaaacggcaacaacagattctgaagagcgttatcaataaattcaaaacttccggatcaattggagcagctaataagattcttgatgctgttggggatggggttaaaactaatattccgattgacgacattgcaaccctttatggtaactaccatggagcaatgaataacgttaaaacgtaccatttccaaggtcaaaacgcaacaatcgaaggagtatccttccaaattgccagtccaaaagaaatcaaccgggtatctaaattagttcgtgcgcaactgggcttaaaagctaaaaatgttgttaatcacgaaactaagatgtacaagtcgcaaccacactacaacggatataatgaaactaacttcattcttccaggtggtgcaagttacaacgatcctggtagtggtaatggtagcgatgaggttactggctctagtcaccattcacaaactagtcaaaacgaaggagaaagtacctcagtaaacaatagcagcgaagcatacagtgaatcacaagctgttcctgctacagaaaatcatgcacaggctgctactacccaacgttactcaacaccgcaatatcacacttatcgcagttataataatggttatcattcaacctacactcacccagcatacggtaaccattatggatatacacatcgatattattaaagaaaaaatcttcgttgaaattaaatcagcgaagatttttctttactcttgttcttcctttattggatgttcaattcggtaaatatcaaagaagtattcacaaatggtcttaataaccgcatagaatggaatacaaagaatcattccaccaattccagcaatatgaccagcagcaagcaacagcataataattgttaacgggtggatttgtaatgtcttaccaataatgtttggataaacaatgtttccatctacctgttgaacaacaattacaacaatgattacccaaataattttatttggcgccattgttaatgccacaaataaggcaggtgcaatcccaatataaggcccaatgtatggaataatattagttagtccagcaacaattcctagcacgattgccaatggctggccgataattacataaccaattgatgtaaacacaccaacaaataggcactcgatcatctgtccggaaatatatgaggacaaggtggaattcatcttcccaagaagctcattcacctctttagcatgatgcggtgaaagccatttctgaatacttggaataagcttagaaccatccttaagcatgtagaatagcattacgggaacagtaatagtcacaacagtaacgtttgtcaacatcccgataatatcacccacccgttcagatagtccttgtagaactttttgagcatagccagctaactggtgatcaaactgacggtaataagaatttaaatcaacgttctttaaaaatgagtgttgaatagtatcattaattaaatgctgtaatccggtaactgtttgcggtaaatgacgaactaaggaagatatttcctttactaccggcggaatcagcatcgttatccccccgacaataatcacaattagcaacagcacaattaataaactagctagccccttgttcatccgaaaacgaccaattttaatcttcataaaaagctttaaaaccggatttaacatataatacaagaagccagagataatcaggggaacaaaaacaactgaaataaaagttaaaaatggttgaaatacaaactggattttcgtacacatccagattaaagttgctatcgacaataacattaacggccaaaaaagccaatgataaaatttttgcttagacatagatactccttaaataaaaagaatcaatatgtccattataaaagacatactgattcttttaaattataagtttaattacctgtaacagaattggcagtaacatggtaagtatgaccatttccagatacagtccaattattagtaccgttttgcgtagcagtgtaaccatctactgaatcaattgatggcaaatcatcagtagactttcctgctaccccacgatcatttaattggttaccaatatgttccttaacaatattccgcgcatcggtagcagtcattgttgactgttgggcattagagctttgttttacgcttgacttagcagaaccgccgttacttgatgtcgttgttgaagaaacagcataattagcattacttgatgagttacttgcactagaagtactattcttagaagatgcgctattttcactagtttgagaatcttcattactattacttgcagtttctttttcagaactaaccttatctttattagaatggtgcttcttagtaaccttacttgaggtaacttcagaactactatcagaattatcagaagcgctattattaccacacgcagctaaagttaacattaaggtcccagcagctaaagttgtaaataatttatttaatttcattaaacttctcctcgtttctatatcatcgctattataacagagatcattattaattacagttaactaattatatcagaattacatattgatgtagaagcttggcttaaagtattttgagtaaccgatctttacaacgtcacctggttctggggcatgaacataagtaccattaccaagagaaatagcaacgtggtatggtgcaccatcactaccaaagaataataatgaaccttttggcgcattcataacatcacgcttgtgaattcctaaagtagcttgttggtaagtagtccggtatgatgcccctaaaccataagcccattgaactaaaccagaacaatcaaaaccagctggggtgtttccaccccagacataaggaacaccgcgttgtgataacgcacgatctactttagcatcagtattattctttacggttaaaacacctgctgaatcagcatgatatttcttaccattaactgttacatcattattttgaactaaagcaccgtcattaccaaagtaatattggtggccccaattagtataaactgaattatctagacgagcgccatctttaccaaagtaataagtatgaccccagttattgtagaaactatcgtctaaacgtgacccatcagcttggaagtaataagtatgaccccaattgttgtagaaaccattatctaaacgggcgccatctttaccgaagtaataagtatgaccccaattgttatagaagccatcatttaaccgcgtaccatcggcttggaagtagtaagtatgattattttggtttaagaaataatccttttgttgttggccttgatcattaaagtaatattgtgagccgttgatgtctttaacaccagttgctttttgaccatcactgtagtaataagtgttaccattttctgtttgccaaccatttaattgagccggtgcagctgcttgaggcttaacggctacagcatcagtagcaatacttgtactggtgcttgctgactgagttacttgacttgccggttgagcaacttgactagactgagcttggttacctacctgtgatgtattatcagtagccgtactattattgatagctgtttgatcagaaacttcaacttgttgtgaagttactggtgtagttgctgcatctgttgtgtcagcattagctacactagtagttgatactccaaatgcaattgctgctgtagcgattgccatgtagcaccaatttttgcccttcttaaacattttgtagtgtttctgttctcccattattaataaatcctaccttccatttgtcatttcttttctttagataaatttaacgattattactttaccacaaataaaaggctggtaggcaaatctggctcttttgttaagcaatgataatgttcgcaatactaatgtaatgagaatgtcataatcgagtaggagataattgattagttcaattatcgacctctcacaccaccgtacgtacggttccgtatacggcggttcgacaacttaatcacattgaattgactggagcgtcttggatatattcataagtccaagacgctccagttttctattagttagagaatagctcaaggtcttactatgtgcagttcgccagtagcccttgcgggtactagcgaagacatatgcatcacgctgggacagccccaatttctgtaagttagttaccttagttttaaactttttccattgcttccagatatactgccttattcggaccctcaaccacttgtcgaggcgttgaataaagttagttagtttcccaattgagtagtactgaagccacccacgcatttttcgatgaatttcttcaaacattcttgtcagagatattccacgattacgtttagttaataacttcagcgctttctttactcgttgttgcgattgtttagctggacgggcgtaggccccattgtggtctacacccaacgaaaagccaagaaatttcaaccgtagagggctaccgactttggttttatctgggttcactttaactttcaagcgcttttctagaaactgggtaatgcttcgcattactcgttctccggctcgttgacttttaacatagatattacaatcatccgcatagcgcacaaagtgatgaccacgtctagtcaactctttgtccaactcatttagatagatgttcgccagtagtggtgacaatggccctccttgtggggttcctttttcactcttagcgaaaagcccatggtctaagactccgctagttagaaacttacgaatgagtcttagtgtccatgggtcatcaatatattgttggagatacttaatcattaagtcatgattaacgttatcaaaataggcttttaggtctaagtcgacaactcttcgatagccttgattataaagatctactacttttgcaatagcgtcatgggccccacggtggggacggaagccaaaactattatcagagaaaacacgctcaaagataggcgtaataatttgggctacagcttgttgaaccattcggtccaccacagttggtattccaagtcttcttactccaccattaggcttcggaatttctacccgtttgactggtgctggtttatacttgccctcacgcaaactagcgatcagttccatcttattttctctgagatatggcagaaggtcattgactgtcatatcgtcaatgcctgctgctcctttatttctcttaactcgcaaataagcctgattaaggttattgcgatccaagactaagtcttggatagtgacactcatacctttaacttcaccataaccggtactacgcgcccttgtgtactttcggttttccaaacctatcctcgacaagaggtcagcttgttgttctgttttctgcgatcgtcgcacctgattacacctccgatataagttacaagttattgtcgttcagtccttcatctgattactcaaactactatgacctcggctgactcctgacttactcaacgctacatcactgtaccgcttgcttctgtggaaatttatcttattcctcttgtcggaagcttgtaagtcaggcctccccgggtaagaatattagctttcgtaccatgtcatcgttagctttactgagaccaacttcgagtagtattggacttcaacttgtctagcagccttatccagttaatttcagccttatagctacttcttgttcatcgatgcagtactttgccttagacttccttcagattccacctcacggtggacacccttgtcctcagttcatggttccgactactacggcccatagcggactttcaccacctagctaatacccatgccgggcgcactagaaaagcagtccatatcaccaagagaatatgaactgctttatttttagataaaattaaagattaaaggctacgcggtcatagcgggttagatcataggtattaattacactacgtaatgaattagtatagctagatgctgttgcataaccatctgcccgaattaaataagtagctgtatttgcatcacgaaccccaattaaattatggtaacggctattcttaactaagaagtcagtatggtcctgaacactagcattattatctggatagcgacggaaagcatcattaattaagaccatccgtccaccgtactcttcataggttggcatattaactgacatacctttatagctccccttaataccaaacaaattgtggtattgtgaagcaagcgaagacttaccccatgcgctttcaagaattgcttgagcaagtgttaatgacggcaagatttgatgttgtgtccatccttgaatagcaccattgacgatactgccaataaaagcattattagaggttaaacgtccttgactatcaaagtcaagattaccataacctaaattaatagattgaccttgaagcaatgccccatctttgccaaagtaatatacattaccccaattgttcataaaacgattgtcccagcgagcgccatcactaccaaagtaataggtatgaccccaattattataaaaactattatctagacgagcaccatctttaccgaagtaataagtatgaccccaattattgtagaagccattatctaagcgagcgccatctttaccgaagtaataagtatgaccccagttattatagaagccatcatctaaacgggcaccgtctttgccaaaataataggtatgaccccagttgttatagaaaccatcatctaaacgagatccatccttttggaaatagtaggtgtgaccccagttgttatagaagccatcgtttaaacgcgtaccatcagcttgaaagtagtaagtatgattagcttgattcaaaaaatagttcttttgttgctggccttgatcattaaagtagtagtctttaccgtcaatactttgttgaccagttactttttgaccatccttgtaatagtaattattaccattatctttttgccaaccattttgagaagccgctgcctgtggagctaccgcaaccttactttcacttaaagttgcttgaacattgttatcttttgctggttgattaatagtttggtcagcttgtgtattattattgttattcgtcgatgcttgtgctcctgcttgatcagtagccacattatttggtgttgaaggtgttgttaatgatactgtattggtaacttgacttagtgcatctgctgaagcattacttacactttcagtatcattggctgtagtatctgcattaacactttgagaaacagatagcgtaccaacagctactgaaagcgtggcaattgccatgtagcaccagttttttccctttttaaacattttataatgtttatgaacactcattgacttatttaccccttttttatttttaacattatctatcctatcacatgtttttaaataagttctcattctattaaattgttactaaaggataatttttgaaatatttttgtaacttaaaagcgttgattaatataatcaacgccctatcatattattagcttaatttagaatactcataatttactaattgtagaaaatcattcatattatacccagtaccaaaataactgctagctcgattactccagtaaccatctggatcagtatgattagtattacctaagtattggctaacattatggtgtgaccaaagagttcctgttccattggactgagctaatgatggtgtcaatccgtacttgcgcatgttgtatgccgtgtagtaagcagcattaactaattcacgagcaaaattccaggcaccataaacttcaacctgttcaaattgaacagcacgaccgttggcaggatatgcagctccccatgcttcatgatcggtatcggaaatttgaataatgttattagcatcaacaaatgcatgaacaaacgcactattataatgctgcttttcgtaattaatttcaccccaaatactatcattgggattatcggtttcatgtactactaccatattaggcttaccgtctgtcgttccggagtatgaatggctacttacatcaggaattgcattaacatatgaaatattagcatgaccaataccattattcataatgtaactattaatcttattattgtaaactgagattggtaaaagaatcccactgttatcggcacgatagaagcttccattaacccaaattcctgtgccttgtactagggctccatcattaccaaagtagtaagtatgaccccaattgttataaaagccattatctaaacgagaaccatctttttggaagtaataagtatggccccaattattatagaagccatcgtctaaccgaacaccaccttgaccaaagtagtatgtgtgaccccaattgttataaaagccattatctaaacgagaaccatctttttggaagtaataagtatggccccaattattatagaagccatcgtctaaccgaacaccaccttgaccaaagtagtatgtgtgaccccaattgttataaaagccattatctaaacgagaaccatctttttggaagtaataagtatggccccaattattatagaagccatcgtctaaccgaacaccaccttgaccaaagtagtatgtgtgaccccaattgttataaaagccattatctaaacgagaaccatctttttggaagtaataagtatggccccaattattatagaagccatcatccaaccgggtaccatctgcttggaagtaataagtatggttagcttggtttaagaaatagttcttttgttgctgaccttgggcattaaagtaataattcttaccgttaatggtttgttgaccagttaccttttgaccatctttatagtagtaactactccctttatctgtttgccaaccattctgtagagcggctgcttgcggagccacagcactcttatttgtggctgaagattgttgatcagtttgagtagttgaattagcctgatcatcttgcttagccgtttcacttgtactttgcgttgcaggtgttacttccgcagcaacatcagtcgtttggtcctgtgccttttgtgaagctactataacactggtggtattgactgtactatcagcacttaccccctgtgaaactgataaagcaccaactgctactaccaatgtggcaattgccatgtaacaccagttctttcccttcttatacatcttataatgtttatggatactcattgatgtgtacctcccctttttatttataatattatctatcctaccataattacaatttttaaaatttcatttttttagaataattttcatatcttatgtgaaatctaggtctcatctttacctctgtaaagattttacctatatactcacctaagacacttagtgaaagaagctgcactccccctaaaagccaaatcgatatcattaatgaggaccagccagaggtcgttcccccgctaaacttctgaactaacgtataaatcataagaacaatacttacaataattactaatattccaagattcattatcaactttattggtgttgtagaaaaagaagtaattccgtcaaaagcaaaatgtatcattttctttaatggatattttgacttaccagcaaatctcttctttctcttataaaaaactttagctgattgataaccaataagaggaaccatcccccttaagaatagattccgctctttatattccaacaaagctaaaacagctttcttactcatcaatctataatcagcagaattgggtactaactgtactcctagttttcgcattagtgcatagaaagccaaggccgtgttcttcttaaagaaagtatccgtttcacggctgctgcgaacaccataaacaatttcatttccttgatgatatttatcaatcatttcatacattgcattaacatcatcttgtaaatccgcatcaatagtaatcattatatctgaatattttgaagcaatgcttagacctgctagtagtgcattttggtggccataattacgcgtaaaagtaatcccagtaacatatgaataatgtttactatagtcctcaattagtgtccacgtattatcgctgcttccatcatccacaaataatattttgcttttagcagagacctttcccccatcgattaagtcatttaaaatcttaccgacttcttttcgtgtttccggtaaaacttcttgttcgttgaaacacggaataataatcgttaatatatcattcattagttttcccctatactttaactttttgttctattgaattaaactagtaatttttcacattgtttctctaggatcttaagattttttcatagaattgattcagctcttttaattgacttctaagcctctttaacttgctaaaaaataacgtttaatgggcctcaactaaatttgctaaaaagctagatactatatcaaataattttccaaatagctttctaataagaaaatcaattataatacataccgtaaaaaccaaaaaagacactattaatgcatttcctaaatagctaagccaattatttgcaaagcaatttgaattagcaatatgctgccatagaataggacggataaacgagtcctcgctgatcaagtataccccaaacattgacaaactaatctcattaatcactttgctataaaattcaaaccttgtgaaaaaaataaatatagaaattgccaagaaaaggtcaatcggattatagagtaatacaaaaatattataatgattatacaaaaaactgttttgagtacacaaatacatccacagtactactattattattcctataattagcatcttccagagattattacctccatataaaaattctagtccgtgtctttgaatgattccaccaattaaatataataacaagaaataggctcctgctgaattaccgaaaacatcatacgtaaaatcgggtttccctggaaaaataaatccgagagtcggcaatactgaccaaaaaagcactagtatcataaacgtatttagcaacattttcatactaaatttttgtaatattaggttcattgccggcatacatagtaacataaatatatatgctccaacaaaccaatatccacttggcaaaggaattggcaaaagtaattgtgatactgtttcatctacagacttaggaaatagaagttttagtaaaccgaatatcaaaaagctataaaatacagttattgttactaacttaatcggtcgcctaacactataacttttctgagacagaaaatatgcacctagaattacaaataaatctacccctaacttcccaaacaacaaaattatcatatttattcttaaagtcggtaggtttgctatagaatactgatgccaattaaaagtcccatgataggcataatgatgtagcacaattgcaaacatactaataattcttagtaattcaaaactagagtttcttcgcactttcatatagaactctccctacattttatcctttaaaataatacgttgtataatatctgcccgtttgtattgttttataagaagctttgtccatttttataccattttgaactatatatacccctctttttttactcttcaattttctattgatcggcaaatcaacaatattccattttccaaagtgattataagtcataaattctgatggctgagcatatagagtctctctatgaaattcataaggattaatttgttggtagaaaataggtaaaacaaaataggataatgaattcgtttgtctaatatcatggctagaaactaaaaatacattattataagacgcagcatgatgtatcatttcttttaattcacttggtgttgtattttcatagttgttgtaagttccgttattataatcattaacataagatttagcggcacccaaaaagaaaagagtaaatattaccatgaaagtaattaaactttggtaattatcaaatgcttccattattccccttgcctcaaagtaaagaattggaactataattgcattaaaatgcgtaaaattaggctgtatcaaaagtaagttccataaagctgaaattagcattatgaacataaaagtatcaagtaccgacttttctttaacaatataggtaataataccgatgcaacaaaaagaaagcattaatggtaaaaaagctccaaaaaattgtggagttattttaggaatcccgtcataaccattaattagcattttgatagaatttgttaggttattaataatgcttgttaataagtgcctattctcaatagcaaaagctgatcgagaagtggctaacttagtagctgtaaatcctccaaagaaaatttcccttttactaataaagttaacatagaggaaaagaattaatggaaggcattctattaataaaataataaatgagactagcacttgtttaatgtcaatctttccttttagaagaagccatgtataaaagcaaatagcaaaagaaaataaaaaaatccaattattagaataacaataagctaataatccaataaaaatcgttatagtaatcaaataagcatttcttgcgtacttactagtcgttgatataaatagaataaataaacttaatataactacgactagcggaataaacaaattactctcaatagcccatctgctagcacatatagttaccggacttagaaaaataactatcaatagcattaatctttgaatatttttaagtattcgtgtcttatataacgaatatgttagaagcaggattgagactaaattaataataattaatggtagtcgatacgtagtaatcgttaatcctaaaattttaacaaatggtactgaaattaagggatataagatattcattccagaaccccaggcatatagataaactggatttttcactaaatgaaaataatcaacaccatactttcccaacgaccaagagttaattcctcccattgcttcatcaagatccaaattaggaagcttatcaaatttataaattctaaccataaatgccaaaattaaaaataccaatagaaatattttatatttgatacttacttttcttattgtatcgttctttcttataaacacagctataaccaaaaaatatactattgtaatagtgaaatatattatctgcattacattgatcctttatttatctgccttaactactatccaattaataattgagtggaatataactaattaattcaattggcaatcactccacactattatacgtacagttcgccagtagttcttacacatactagcaaagatatatgcatcgcaataaaacaaaactaacttttgtaggtaacgtcattaagttagtgttttaatacttaatgtttgattttctctctgtattttgaaatattttagttaacttaaaaaccatctaattggcaattccctgattgttaattaggtggttttgtctatttaataaattgttatagcacttccattgtattcagaagcaacgctcccccacgaacgccaactatctgctcctgtatcataagcatttcctcccattgaatgcgcaccttgccctctgccccagtaacatggatccaatacgtggaaatagccattagactcaccaattataacttttgcatgattacgatttccatacatccgttcaaaggaagaaaatccataatataataccggatgaccagtggcaactatagaagcaatttgagataagtccttaccagaaatatcacgtacactactatctatatttttatatgcccaccatgctaatgctcctgctggaatgatacctgaaaaggcaccagtgttatacacaccgccagactgtggtacatggttataggcatatcctagattaaaaaacttacctttagtacttaataacattgccaatgcagctactgagcatccttccggtgcattgattggtgtaaattgactaaagtattgagctgtgcgcaaggaaccgtcagattgagcataccaatcttgtgagttaagaaatacataaccatttctcagcaaagcaccgtcatttccaaaccaatatgtatggccccaattactatatgtttggttagtataacgggcaccatcatttccaaaataataagtattaccccaattattataaaagcgattatcccaacgggcaccatctccaccaaagtagtatgtgtgaccccaattgttataaaagccattatctaaacgagaaccatctttttggaagtaataagtatggccccaattattatagaagccatcgtctaaccgaacaccaccttgaccaaagtagtatgtgtgaccccaattgttataaaagccattatctaaacgagaaccatctttttggaagtaataagtatggccccaattattatagaagccatcatccaaccgggtaccatctgcttggaagtaataagtatggttagcttggtttaagaaatagttcttttgttgctgaccttgggcattaaagtaataattcttaccgttaatggtttgttgaccagttaccttttgaccatctttatagtagtaactactccctttatctgtttgccaaccattctgtagagcggctgcttgcggagccacagcactcttatttgtggctgaagattgttgatcagtttgagtagttgaattagcctgatcatcttgcttagccgtttcacttgtactttgcgttgcaggtgttacttccgcagcaacatcagtcgtttggtcctgtaccttttgtgaagctactataacactggtggtattgactgtactatcagcacttaccccctgtgaaactgataaagcaccaactgctactaccaatgtggcaattgccatgtaacaccagttctttcccttcttatacatcttataatgtttatggatactcattgatgtgtacctccctttttatttacagaattacctaccctaacataactacaacttcttaaatattttagaatgttttagaaaccccattttttaccttcccaatttcattttctattcaataatagcaaattctttgtaaattagaaatgctcaattaaaaaaacttacgtacttcttgcaatctaaattcaaattcccttctctcctgccgttgaatagcatctagtgttaatccactgtaaaaagagattatagctgctattgcgcaaaagccacatataataagtgtcggcatgtttgcaacaactccagtcatcctatatggaatccatacacgtggaataaatactgctatcgatatgatcatcagtattaacgatagtataccgtagaaattaaagggcttatgattccggtataaagtaaatattaacctaagaaccctaaatccatcggaaaaagtatttagctttgagacgcttcccataggccgatcacgataatcaattacatagtttttaattgccatattattcactatagcaaaaatactcatttctgtttcaatttcaaatccacgtgataacactggataagtcttgacaaactccaaactaaaagcccgatatccagtcataatatccttgatatcatttttaaagaaaaaattaatactccatcgtactagtttattaccgatcccatgaaaagctcgcttattttcagtaaaatagctagaactaaggcgatcaccaattaccatatcatatttatcttttaaaatgtaattagccattttaggtatttcttcagctggatatgtatcatcaccatcaatcataatatagcattcagcattaacttcgcgaaacattctcctaataacgtttcctttaccttgtttatgttcataacgaacaattgccccagctttttttgcaagttctgccgtattgtctgtagaattattatcatatacgtaaactttagaattaggaattgacgaaacacttttcaggcaatcttcaacaactttttttattgtttttgattcgttgaaacagggaattaatatagcaattctatccacttaacattcatccttccttacatttcttatatagtaaatattatttttaaatatctcaactatattcacaaatccaattcctgctaaagtagtaatgaatgggagaaattgaattaggtatctacttcttccgccttcaaataaaagcaaaaatatcattccgccacttactacatactttaataactgtacttctatttgcgaattcggtaaagtagctaaaatacacaatagtacaactatccatagactttgtacaattaaactattcccagaccaatcctttcctgaagtatccgaaacgtatgttttttgaatttttgctatcaaaggattcttagaattcgaatatggtatcaaaaagccaacttcgccaccatcatttcgccaaccaaaagtagcatcagacgtattagaaatttgtttattgaataaaaacttagtatagccgagcacttgtttctcgtgcaatctttcttttataaggttaatgttcatttgatttcttttactttgatctttaattttttcattaagcaaaacatcctgttcattatatcctccaccttgtgctagtcccattgccatatagtgtgtaagagtcatggctctttccttttcaacttttacaagactggtatgagaagctgcactgttgaacacaggaattataattaacggtaaaattacgaaaataattaaaataaaaaaatgctttttgctgatttttctattcgtcatctcaacaaatcccattaatatccaagcaaccatatataccatcaaactcggttttactaaataggaaatagctaataatgtcccaagcccaaggcatagataaccttttttaccaaaattagatgttcttataacacgataacccattgctagggtaatagtactaaaaaataaggcccaaatatcactatatggtattgctattagtggagaaataactattaaagtccaaaagaaaaaagctgagactacagatatttttttgccaaatgttttttttagcgaagagaataaaataagtaatgacgtatccaataacagcaagtttataatattaagaatcttagttagtgttattaatctagggtgccctgcaactatataaacaaaatgctcaaaaaacagcaataataacgtatttggataaaaagaaaaatagtcttttacccaataactatgaccagcagctgctctcactattatagaaggatcccatgtagtacttccagctagcgacatcacaatcataaattgccaaagaatcgtaactagaaaaaatagaactagaaaaacgcgtttattcaatactataaattttcttattttctttgccaaataaacgctctttccccaatatgtacctataaaagctatcagcattatcaaaacgatactgatcaacactattagtttagaggatcttccaataatagtcggtaaaaccacaatggcacctattatagatactacaactaaaattactagaaagaaattaattattagattacttaatcgaattagcttcatgctcttccctccatcattttttgactctctgatatcataattccaacacataatggaacaactgaaacaatcgggaaagcatatctatataaaacaacagggcctagtaaaaatgttcctagtaggcttaaagttaaaactattaggaaaatatattttctttccttaaaaataatcatccacgctgtaaagaataataagataaaaacattaaaaccaatgctatcaatcatcgatattacaggaatacgctggtttggataactattaacaaaattagtatagaatttatataacggttttaaggctttaggtgttgctactctttcatgatgccatgctttctcatttttgtgttcttgcttaacgtacgatgaatattctaagaaatacttgtaatagcttcttcgatccggataagaggtatctgggtaccaataaccaatagtcatcttagcaaaagcattcaaatattcattaggattttgttttgctaatttgaaccataatttccaaaaattctgtttgttttttatatactggtcggaattaaaactagacttaagtggatcagataaagactgacaattttgagattcatacattttataatttggaatataaattctaacttgatttacctcatctgaagtaatatccaaatttttttgtgacgcaacacttgaaagctgcataattggaatgctcaaagattcacgtaccctatcctctttatctatatgcccatttagacttcttgtcacggggccattatagataactgttccaaaaagaattgcaatacaacttaatagcagctcttttcgaatacttttttggaaaagaaatgcgaaaacaagagaaagcgtgataacatatacgccttgattttcaaatattaaattaatgagagcaaataaaacaaaaatggtccaatactttaactttccgaactttaataaccaattttttctttctaaataccacaggactagaataataaaactagctgtataaggtacattttttgttacagaaatcgacattatgcctatatatggtgaaaggcaaaaaattacaaaaaaacatatacgaatagcatagtttaaatttatttttcgtagatattctaatactcgagaataagcaaacgagagccataagatttgtaaaaacgtataaataaacagtccttgtgtctcgccacctaaaatatttctaccaatttttaatacaaagaaaattagtagttccgtatgtgcaagtggatgatgaagataaatttctctagtatttagataactttgtaattggtatcccgcatcataggcgtaattacctggataggtagcaaatagttctattagccaaaatattatcataccgaaccaaagcaacttccacgtttccctgcaattgaagaatctttgaagggcattattagtagagaaaatagaattgagctgcggaagagaaagatatatataattaactattacaaacaaaagaggtaaattccctatcacctttatccatgtctttaacgacatgaaattcacattattataccgatataaatttactccaataactagtaatattgaataaatagttgccaaacataaaagaacgaatattgatcttcttgaattttttaaaaaatcagttgaactatacaatttgtaaattacaacaaatagtaaaacggaactccaactatttgtatatgataaaccttgattaggatctttaattaagtattgaaaaaacacaactgcttcaaaagaaagaataaaagctaacaatttatacagactttttctattttcttctatcatttttcttcctttcttttttaactaagaaagtctttaattcactaaaagggtgttgccgatgcatataaaatgatcttaaaaaaggtatgtacggcatcattaacgcaataatcgacacaaataatattcggtatacaacaccaaaagcaatggctggtaaatagccgaaatgattatttaccatttgaataaccttaggccataattgtacataatcaagatcaattaagtggaaacataataaaataagagactgttctccaaaaaataaaaagatcctttcaaacacctctattacactagcagttaagttttctatatacatactaaacttcataactactatacttgacgttatcccaactggaagcgcaatataaatattcgttgcattgaccccttcaaaatcaaataggttaaaaaatgcatcccaaatccacaataatagcagcataactattactaaccaattcaccttggatagaatattatacttttttatcaaataacctgacatgagaaagcactgagctattaacgcaggttgtactgaaaacggcaaaaagaaatatttagctgtttgaacacctaccaaagttaataatattattaccataactttgtatcgtacttttattttgagtttcataatcaaattaaaaatttgattagcaatgaacattgccattaaaaaccaaatagcacctatagcttttatttttatagatgtatctggaataaagacatctccacctgctccataaatagcagagaagaaaaagtctctaaatgatgaacccctactaggcgcaattatactgttaggaaccattctgtaaaggaacaataagataaatccaatcgcaactgttgcaatgtaaggcattaataggttaaaaaaattctttttttctagtgttttctgattttgctcatgatataaatatccacttaggataaaaaaaattggcatatgaaaggcaaaaaggaaattacccaaatatccaggccaatagttgcctaacgaatgtcccgcaacaactgcaataatagcaattcctcttgcaatatcaatccatgcaattcgtttattttttgtattggttttcatctatcttaaaatccatttccttttaaatttagtttcctccagaagaaagcgaaaaatgaaggaaagtaatagttaagccaataaattattttatctcggctaggtaaaatatcattctttaaaaagtcataacgatactttttttgattgtttctcaactcatccatcaatttgggagaaatttcttttttattaggagctaaataaatatttctgagaatagaggttgaactccatagaattgatgcattaatggcactcactactttaggataattcattggctcaacaataagttttattaaactataagtttttaaaacatctaaggattcttttttaaaatcactaccgtacttattagaattaatttggctatcagaattaactatataatgatatttcacttcaggatttaagctaatacggctacaatgagataaatatttacaacagaatagtaaatcttcagcaatcttaatcccattatcaaagctaattttattctctcttataatggataatttaaaaagtttattccataagtatccttcatagccggtactaataaaaatatcatgtaatgcttcttcacgacttaagttttgctttgtacctaatcctttaaaacgaactatcccatttttttcttctttgcagtatccaacaattgataaatcacactgttgtttcttatattgatccaacaataattccaagtagtccttttcgacatagtcatccgcatctataaaagtcacatattccgaatttgccaattcaagacctcgattgcgcgtatctgaagcaccagtattagatttattaactacctctactctgttatcatctttatattctaacaacttatttaacgtaccgtctgttgaaccatcgtttaatacgattattcgatatttttcttcagtggtttgattaagtaagctataaaggcaacgatcaatcgtatttattgcattaaatgccggaataataatgttaattttctcttccatctgttcttctctcttttaatattttcttaacttgatttactattggtgcacgtaaagcaattatacaaatgatataaatcaaggcacccaaagcaacctgtaatattaagttagctattgtcatattcataatattatcaattcttgatacaactaaatacataaaaaatccacttaaaatatatcgccatataggcgcaaataaccgtctacgtcgtattgttccttgaatataccatagctgaacggctgttactgaaaattcagaaattacagtagctactgccgcaccatttgcaccgtatcttgaaattaaaaagaggtttgtaataatattgactaccgctccaacagttactgaaatagtaaattcgtgttcacgatgaattggcattaaatattgggttcccgtaacattactccacgcaatcatcaaaatagcaggtgcttctaaaaagattacacccccagtcggctcgtactcatgtcctaaaaaccaaggtgcaaatttataggcaatcgccattaaaccaaacatcatcggaactgaaacagcagttacaaagtcaaatgatttatataaactatctctaacccctttaacatccccagaagcaaacttatttgcgatgtgagggagcattacagttcccgttgcagtaactattgctaagaccaatttcacaatattatctccaaaattaaattgcgaaaccgctgcttgcggtgccatgcgccctagcataatccgattaaccactaagtatatttgagtagtgattgttggaatgaataataacaaagctggataaaaatgttttaacggatgccattctttaatttttacccattgaatattttgtcgtaagtatggccataatgtaagactacccgctaattgagcaaatcctaataggaagatatatttcgctaaatcgccttgattacgaaccataataaaaatcaaggcaatcgtaattaatttaacaattgtatttctggaaacagttttcttgaaatcttccattcccataaaataccacgaaacatcaatcccgtaagcaacaatccataaagcttgtaagagaaaataaaccttaaatgcgctactgaataataaaaccgccaataagtatattattagtgcaattgaactggtaaaaatctgaagagacattatcccccaaaaagtttttgaccgattatatttatctcctcgttgataggctatttctcggttaccatacaatgaaattccaagttgtccggcaagatagaaaaaagttacccatccattcgtataagtgttaattccgttattatttgcgcctaatacccgtgatacatatggagtggtaatcactggtgccaacattaataatatttggtatcccgcattatataaatagtttttaatgaccttcatacaataacctcgtctatcctttcaaactaaaaactaattttaccactgtcctcttataaacaaaaggtaaccttaatcaatattaaaaacgacgagttaagttttcccactcaactcgtcatcaggatttattcaaattctttattaacagccgtcaatgctgcatgcaacacctgatccatgttgtaataacggtattggcctaaccgaccaccaaaaataacattatcagccttttcatcagctaacttggtatattgcttgtaaagatcgttattccgttgattgttaatcggatagtatggttcatcaccacggtgccagtcagcagggtattcacgagtgatgatcgttttatccttatcacccttgccgaactcaaagtgtttatgttcaataatccgtgtgtatggtgtttcggcatcggtatagttaattaccgcgttaccttgatagttatcaacattcttttcttcagtctcaaaacgtaaacttcggtactgtaactcacccaattgataatcaaagaactggtcaatcatcccagtaaatactattttcggataatcttcaaggtacttagccttttgatcaaagaagtcaacaccagtctcaacatcaattaagtcactatcaagcatcttctcaacgatctgagtgtaacctccaattggaatcccttggtaggtatcattaaagtagttgttatcatagaccaaacggactggcaggcgtcgaatgataaaagctggcaactcggtagccttttgtccccattgcttttcggtatagcctttgatcaacttttcatagatatcacgaccaataagtgaaatagcttgttcttcaaggttctttggttccttgccagccattgcttgtcgttgctcattaatcttagccattgcttcttctggcgtacgaactccccacatttcactgaacgtattcatattaaatggcaggttatacatatgccccttgtagttagccacaggactattcgtatagcggttaaattccgcaaattgattaacgtattcccaaacttctttattagatgtatggaaaatatgggcaccatattggtggacttgaattccgtctacttcctttgtatagatattaccagcgatgtgatcgcgcttttcaattaccttaacgcgcttacctcgcttagcagcttcgtaggcaaaagtagcaccaaaaagtccagcacctactactagatagtcataattattcatattcctacgacccaactttcataattttttctactgctttattaaaatttaataaatacacctcaggcataaatttttttgaagttttttgaatcattaatggtgtaggcatttttttattatcaataattttttgtattatttttgttaattttttactattccctgatggataaagttctccattataattattaattatatcttcagggcctgtactaatatcagcactaatgcaataaactccgtgagagatagcttcgcaaagaaccattggtaatccttcatatttagaagttaatattagtgcagttgctctatttattacagaccatggctttttaacaaagccatgccatattatatttttatctactcccaattttcttgcatactcttttactggcgtcgcttgagcagtattcccatatatatctagttttagctccccttttacaccagataatgcatttaataattctcgtaaatttttttggccatctagcattactctaccaatataaagaaaatgtggagtgctttgtggcctgttaatcaaacgtaaattagttgttatcggattaaaaattaagaaaatcctatttgaactaattccacgttttttaagctgttcttttatcccagaactaatagctaaatagtaatctgcagagtttaaaaatatatgcttaataggcttttgatcaatcgaatagtgataccaggcaatcacaggtgtcttcctttttaatagctttaaactctttttggctaaataccaaatcactggattagttgatataacaaaatcaggattttcttttctcaaatagttaaagatattaagcggcataatcgttaacgcatataaatcacgtaaaaatcttcgcttactaatccacttaatatctatttttacgttttctgcccagctataatcaaagcttccaccaatagagtatacttttaactcaaaagcttgttctgacattaaacgtgccttaaacaaattttttataaccgtttctgttccaccaaatccagtcataaatggtacaattatgatcccttttttcataaaaattccctttaccaaataattgcttcgatgtttgcaatagctttttttatatgattaccatttcttaaatcatttgaaaaagataacgcatttttcttgactaaactaaaatcactctgggttatactacttaataaccctggtaattcataaaggctactaatagtatatcctagcttatttttagaaataatgcttgctatcgcagctttattccaaacaataattggaatacccgtacttaaataaagtgatgccttatgtggacaattatactgtaaatattcaccatacattccattgcactcttcagcactagagccatcccaaatcaaaccaaagttttctgttaaatgggcaggcaattcttcaggagaataaactcccttatatttaacatcgttatccgtcactccactaaaatttggtccataaacatccaatgaaatctttgctggaactttagacaaaaattgagccttttttaaatttccagcaaaacaaagtgtctttgtatattgataattattgttaacagattgaggatttaaataatcaaataatcctaatataaccatcggagttgtaattccattatctttaatccactttgccattgtattattatgaactatcaggccatcaacttgttttaaccaattaatttcctccggtttatacgttggatcatccttataagatcttagagattctaaatcatgaataatcaaaattaattttgcctttgtataagcacgaatatctctaataaacgcattcattaaggctcgtgaataggttggaaattgaaagaaaatttcatctgcttgtaaatttttcattaatctaggaatattccaattgatatatttaaattttaataattttgaatgccagttaaatcttaaattaattacttgaaatccctctttttttaaaatcttatcaatatctgttttagctttaggaccagcattatttttatcaatttcattaacagaaataattactctctttttttcattaggcacttttttgaacctactttcattttgaattaaattctttagacgtaataaaaacaaaggaaataattaaaccaactaagccccccaaggcaactccgacagctacatgcttttttattgaaggagatgtcttacttgaagtatcacttttcgttgctttatcaacaattcttacattttctacacctggctgtaccttaggcaattctttgacaaaggctttagcagatgcatttgcgattgttacagaatcttctttggattttgtagttgcttctaatgtaagtactaatgattgtggttgagttttagcatcaatcgcactatttatatcattttgtgaataatcttttttcatttttgaagaaagatactgccgagcttctttagaaacagtcatattctttgcaatttcttcatatgttggcatcatatttaaatctgcattgacaatattgtcctgactcttattatcattaatctttaagtcatgggaaatgacaatattagttttagcagtatacgttgttgattgatgtctttttgcacgaatccccattattcctcctccaaggatcgccaaaactataattataagtaaactcttccaaaaatttctatataaagtttcagatttcacgattttcctccaataatgttcttagacttgtcttttgcataaacctctgctaatagcgcgatcaaaaacggatcataactaacatcaagaagcctttgttctacaactgcgctaatggatataactactaaaactgtcgcaagagcatatttctcattgctaattgaccgaaacgagataaacgtcattattcctaaaacaattaaaagtgcaattattccatataaaatcataatccgaatatatgatgagtcaataaaaaaatatttactttgatttgtcataaacattctcatcccagttgttcctccccaactgtgttcaaccatatgttgcccaaagatggaaaaaccatactgctcaaatcccttttttccaagagctaacctaccggataataagctatttatcttttctagaattaaattagatttattgtagaagtaggttattaaaaaaattatatatgctgataatattggaactgaccagtagtaattagctatcttttttgcaaacttctttcctcgttgtgacgctttacctattatcataacaggaattaataataggagtgatacggcacttaaacgagcatcacaaaagtaaataagtagatatgcaagtaaacaaaatacaaaatagctttttattgatattttctcaaagaataaataacagtatgctaaaacaaaatataaaacatgtgcagcaaagtctgttgggtaaacaacaccaaatgattgtctaattgttccagtggtttgtcctctgcgataaaccaaattctgaattacaccggttaatgagctgaatacagcaagtgttaatataattattcctacataaaagtacaaataaataattctatcaaagtttactcctctagcaccaagaataaaaattcccattgaaaatagcataaaatctgaggaagttcgccatgtaagtactaaaaagcctaaaacaaatatatctataaggaaattttttattgtttgttgatcaataaaaaataatttaaaaattatcatccccaatgcaatatacgaaaacatatgaaacgtatttttagcgaaaaaatccataaaagttgtaaattgtaagaaaaaatcagtgaaataaaatacaaatgcaacttcataaattaattggccatttatatagaatttatttatttttaaattattcactcaattatggtctcctctcctaatacgcgccatcacgcttaaaaatactaataatgttcttaaacattatctttgtatcaaaagcaagtgaagccttatcaacatactctaactcgacatcacagcgttctggatatggaatgttgctccgaccactcgattgccacaatcccattgcacctggttttactgataaaaacttatcaacccgatcaccatattcttcaagttctttttttacaataggtcgggggccaataatgctcatctcgccacgcaagatattgataaactgtggaatttcatcaattgatgtttttcgtaaccaccgacctaaacgggtaatccgtgggtcttcttctggctccagtttatagttattggcaacatatttagcatacatttctggatcattttctaaaatcttatccgcattcacaatcattgaccgaaacttataaatcttaaatggtttgccatgccaaccaattcgttcctgcttataaaataatggacctttgttatcaccaaaccgattcattataaaaatagtcagaaagactggactaaaaccaatcattgctaatgacgacagcgtaatatcaaagaaccttttccagaaaaggtatccctttgattgttgtttaatttttaccttctcattcatgattctcaaccctactttttctctttaataatatatattggccgtttcttggtctgcatatagatccgaccaatataacgacctactattccgaggcaaagtaactggataccacccaggaataaaataatacaaaccattgaagcccagccaaaagcactactagcaggctcaataatctttcttattataacaataatcatcccgataatggagataaatgccgttaatccgccagcccaggtagcaattgctaagggagcttctgaaaaatcggtaatgccgtcaatcgcatacttaaataacttccaggtcgaccaatctgttgttccagccacccgttcgacatttttatagggaaggtacttggtcttaaacccaacccagttaaaaataccttttgagaaccggttatattcagttaatgacaacaccgcatcgaccatctggcgggtcatcattcggtagtcacgggttccagagacaattttagtatcagaaattttattgataacattataaaactggttagaaaggaaggacttaaactttgcctcaccttttcgatctgtccgccgcatccccacgcaatcatattcacccttagaaatatcctgatacatctctggtaaatactctggcgggtcttgtaaatcagcgtccatcacaacgacataatcacctgttgcgacctgtaagccggcataaagccctgcttctttaccaaaattccgtgaaaaagaaacataatgaacccgttctggatcttgtgcgtgcagcttgcgtagttctgctaaagtgtcatcactcgatccatcattgacaaaccaatattccgtttctactggcatctgtttaactactttttcaactgctgggtaaaaaagtggaatagtttcttcctcattataacaaggaacaactattgacaattttggcattcttgtctctccaatcgttaatgttcaccatgaccggtgactttacgttttaagaacttcacaatctttaatggccagttttgcttttcaagaaatacccggttaacttccactgtcttgtattgcggattagtcaacaaccaagtatctagtaaaagctcactcaaaaagccaaagacccgttgctcatatggtgtgtagtcagaataatcaacttttttctcaacttcgcctaaaacatcaaacagccaggtacaatattcatccaacggctgcttcttcataatcatcatgttgaaataatgagccgatgtctgtttcattactttttcaaaagcaggtaagtagtggggatatttatcctttaacacctgccgcgtaatttcaagcggctcgtgctcatgaacatggaggtaatgggattcatttgtttcaatgtaatagtgccgcttctttggcaagattacatcggcatcttttaataactcttcaacttgtccatgattgaggatggtcgaaagatcctttgagtgtcccagcgtcaagtaacgacggtagtggactaatcctaatgcatccacatcatcaagatttttccatccccagtacaaagctgttagctcattgtaatgcggattcttttttgaaatattatctccggtattatcaccctgaaatgtatgattaacagtcgggtgaatctctttaccaacaaaaactggtaaatacattggatcatctggcatccgataatttttatggacagccactaagattttaatattcactattgtactcctaattattgtttttaaacataatcattaaaataataccagtaattcccaatcttggaaagttattattggaaatcctgcgcagctagccagctctgcacgtcatccagatcaaagcccttgcgatacattgtctgcttaaaatgctgctcacgctcgtatccttgataacggagagcacgacgccattgcttcgctgcttcttttgctaaaaggtcgttctcttgctccagatcaggttgtggaacaacttcatccttaatcatttcatacacactactagagaagccttttgtcatgagcccctgttgtaccttttgttctcgtcgccgctctggctggttccgataacggcgaaatagttttacagctaacttctttgctaattctgcttgaacttcgggagtaaattgcgttaaagcatcatcaatatcgttttcgccaatccctttttgtcgtaagtgttgacgaattaccccaggccccttcaagtccgtgttaatcatcgtgcggacataagaagccgcataggcatgatcatcgattaactgttgaccccgcagctttttcaagattggctcaacaaactcttctggcgtatcaatttcttttagcttcttaacgatgtcgctttccgtccgcatctgataagaaaggtagtcaagcattcgtgaataagcctttgcttgctggtcagcagtcgcaatggccgcaatttgcttttcatctagctcagttcccttcatcaaacgaaactgaatcaaaacactttctgcaaccggaaaagcatacttaccatcaaggtatatattatatcgacccttccgtttttgcgtctcaattttcgaaatttttgccatttttaaatttctccttaacattctcaatttttaatcgtttataaaggtgtaagcagtggccgctacttaacaaatcaaattaaacaaaggaagtttttatcatgcaaatggttcgtaatttcaaatccgctaaaattcagcttaccctcaccaacagtgaacatcccaagggcgttaaacatccctttaacaacattattgaggatgtcactaatgagcaggtagcacaatttagtgcggcaattgaaatacttactgctgaaagatgccttgatacagacattatcgttactagtcaagttgcaatgaacaactaatttcaaggaggaaattaatttatgcgtacattaagcttaactttcaagggtagtcttggtaaaaaacattcattaaagttgaactatgccagtggtgatctcgatgccgaaaccgttcggaaggcaatgcaagaaattgcgcaaacccacctctttactaaggaaggcgaagatatttatcagcaacctctttctgcaaaatacattgatactgtttctaccgttatctttaacgacgagcaaaagtaattaaatatcgagttctaaagatcttcaacatttggaggctaggaaaaattcctagcctccatttttgtttgtactctttctttctaccagttgccaaaagtgtttcttggcatgcaactcaccttcatgacattcttgtagagcagcatttagcgccgcccccagcatgatgatatagccagaaaagtcaagccataccatcatggcaataaaagctccaattgtcttgtaggaaattaccccgtgactaaataataaggtatagaacgagaataaacgtgataatcccatccataacaaagacgccaagaatgacccagcaagtgcatagcgcaaccgaaccttcgcattaggaacaaagtaatacaaaagagcaagagcaataaacaagacgccaaatgttactggccaccttaatgagctaaacaataaaatgtagtcacgccgaaaattaaaaatcggctgaatactctttaggacttgttcaccaaaaccgtacaaaataataataataaaaataattaccaataatacaatcatccaaataaacgagacgattcggttcatcaccggattctgattttccgcaatcccatacgcatgattaacgctgcgttgaaaagcggcaatcccctgactggtcgaccaaagagcaatcaaggccccagttgtcagaacaccaccactcccccgtcgtaagaaatcataaatcaacggctggataaaatcatagaccgattcaggaattgcagttgagaggtaggctaaaatcgtcttagcgtcaattccaatcatcggtaataaatttcctactaccatcacggcgggaaaaatagataataaggtatagtaagctaagacagcagcagaacttgaaatctgggccattgtaatatgttggattaataacgcaataaaagtcttccctttgcccggttccttgtccataataacctccgaaaacattttataggtttaattataacaaactgaacacccgacaaatattacagaatagataaaaaagcggctgggagaaaacttttgttttctctcagcctcaattacttattatgaataatagtaagataacgtggaactagcttcgcgtcgccacaaggctcgagtctaagtacgaacgataatcagcccgtgccgtgctaatcatcgttccagcttagcccaccgccttgtcgagaaggttatttcccacttccttttttatcaattacccttcaacatggtgacgctttgcggaaatttgatagaagaccaacgcaacgattgcaaagaagattggtccagcaagtgtccagaaagctgtttgataatctttttgtaatagtggttgaacaaacgtaaagacgattccgacaattaaaatcaattcaacgaaacatactaatacatctgtccagaaacggttcttaaagacaacgaatggccggtcaaggtccttctttgccttaaagaatgggaaagccccgatcaagaaaacatatgggaaacaagttgaaacgttcgccatatcagtcaaaatcaagtagaactgttgagcagcatttccaccaaaggcaaccaagaaaacaataattgaaacaataattgcttgaagccacattacatttgcaggcatccccgccttgttaagtttcgtaagtttctttggccataattctggattagaaccaagaatgaaggccttgattggggagtaaagcagaataaacaacgcgcccaaaaagccaagggtctgtgcaaaggcaacgatccgcgtcatgataagtccaaaagtaagggcagcaccgtgcgaccatccaagcgtatcccccatggtaacccctaattgattaaagacaacataggtaacattaccaaggttaacgctgctcttagtcaaagtttgttgataatttactgaccaaccgagcatgaaaatcattaagacataagtaccaattgtaaagatacttgcgatgatcaatccacgagggaatgtcttttccggatttttcatactatcagtaacagaccctaatgattccattccaccgtaagcaaaaatagcataaacaacaaacgaaataatggcaattggtgtctggaattgtggattaggtgatgtaatgaaagttgaagcaccatgaattggttgctttaagattcccttatcggcaactaaaacaataacactgacaataacaaagataatgttaacaacaattgtaaaaataccaccaagtgaaccaactttagcaatggcggtcattccccgtgaactgcaccaagttgttccaagaatcaacagaatcccaaggaccccaatcaattgagtcgaagtcagaccaaatgcatgccattgttgggtagtatccttaccaaaaagcaacgcagaaaaagtaatccaaatccgtgatgctgttgataccatccatacaatccaagatgctagccatacgaaagtaccgacaaaggcgattcgttcaccaactgaaccggcaagccaggaataaatgccccctttagcatccttaaatgtggaaccgtactctgccatcatcaagccacagggaaagaagaaacaaatccctgctaatgcgtaccaaataatactaccgtaacccatttgtaagtaggcgtttgaaacattcccaaaaccaaaaatggcggtaatgatcatcgtcactagtccaaaggtagtaatcatctttttattactactctgttcgtccaaaataatgcctccaaagctttaaaattcttaaataaaaataagaaattatttaataattattagtatagtcgtcttttaaaaaaataaaagtcttttaaataatttcacattacttttatactaccttttgtatttttacgccaacttagcaatctttattcgtttatttgtatattttgttataagcgatgtatactattttcattacttaataatcgctttcacatttaatcttaatgctatggatagcgttttccgacgctgctataattgagttaagaaaatttatgtgattttcactctaatatataagatcgtgaggtggagtaaatgagtgagaaaaaaggtattaatacgacggaactaacccttttaatcgtgggatcaacaattggttcgggagtatttggaattaccagtgatttagctaccgcggcggctcccggaccagcaatcattgcctggataatagtagggattggcgtcttgactttagttctctccctaactaatctttcgcaaaagcggccaggccttgattcagggattttcagctatgcggcagctgcttttggtccgctgggcgaatttatttctggttgggcatactggctttcagcgtggctcggcaatattgcttttgcgacgattatgatgagcgcccttggaacgtttttccccagcctatttgccaatggtcaaaacttattctcaattattgttgcaattattttaacctgggttttgacattcttggtaaatcgagggatcgaatcagcggctttcatcaattcaattgggacaatctgcaagattattccattagtcgtctttgttatctgtgtgattcttggttttaaagctaagatttttactgctgatttctggggcaatgtaacacagaatctcagttcaaaaatcgaaactggttcaatctatgaccaagtaaaggcctcaattatggtaatgatgtggctatttgtcggcgttgaaggtgcctcggttctttctagtcgtgccaaaacacggactgatgctgaacgggcttccatcttcggtcttgtaagcctactcgttatctacattgtggtttctattctgccatacggggtaatgacccgcgcccagttagcagctggtggtcaaccggcgcttggggcgatcatgcaacatctggttggaacgtggggtgccgcccttatcagcattggattgatcatctcagttttagtttcatggctctcgtggacaatgctaccagctgaatcattaatgctaatggctgatgatgaaacccttccaacatcatggggtaagctaaatgacaaaaaagcgccaacacaggcattaataatcaccggggttcttcaatcaatcttcctcttctctttacttttcactacctatgcttacaactttgcatatacgctttgtacggctgcgattttgatctgttacctccttgttggcatttaccagatgatgtacagttggcaacaccaagaatggggacaatttgttattggactaatcaccactctctttgaactgatggcaatggttctctctggctggaaagaaataatggtcgtttcagtcggttttattcctggattcttcttttacgtccaagcatgcaaggaattccatcactcaatcacagtaaaggaaaaatgggcaatggggattatcgctgtctttgcggttatttctttagtattagtaatcaacggaacaatttcaattaattaaaggaggaaaagatcatggtagaaatagcacattttggtgtcgaagcatggctaaataagtgggaaaagagcgcgacttatgatatttcacaaagtacaatcgcctctttgagtatgcacgatctcttaaatttagatggtaacaatggtgaagagttttatgagatgcttgataagcagcaaatgaactacgggtggattgaaggatcacccgagttcaaagaagaagttgctaaactatatcatcatgttgatccggaaaatatcttgcaaacaaacggtgccacaggagcaaatattttagctctctatgccttgatcaatcccggtgatcatgtaattgccgaatacccttcttaccaacaactctacgacattcctaaatcattaggtgcagatgttgattactggcatattcatgaagaagataactggtacccacgaatcgatgacctaaaagcgatggtcaaacctaatactaaaatgatttgtctaaacaacgcaaataatccaacgggaacggttcttgataaagagtttctcgaacaagttgttgaaattgctaagtcagtcgatgcttatgttcttgttgatgaagtctacttgcccctcgatcaccccgaaaaatttgcgcagattattgatctttacgataaaggaatctctactaattctctttcgaagacttattcagttccaggagttcgaatcggttggaccgcgactaacgctgaagttgccgatatcttccgtaagttccgtgactacaccatgatctgtggaggagtctttaacgaccagctcgccacctatgttttacgtcatcgtgatcaagttctcgcccggaaccggaaattagttcttggcaacctcgccatttataaggattggattgatcatgaagaccgagcaagtgtcatcatgccacaagcagtctctacttcctttccaaagcttgacgtgccggttgatattcataccttctgtgaaaacttacttcatgacgaaggggttctcctcgtgcccggcgatgcttttgatactccaggtcacgttcgcctcggctactgcgcaccagaggcaactttaaaagaaggcttaaagcggctttcaaagtatatgcatcaatatgattagcgttacaaaaaaggatgttagaaacatgcaaaagttttctaacatcctttttactgctagcgattaattttcaaactgcttagcaaccttttctgcgatctcacggtaatggtctaagtacttagcataattatcatcgtacatgtaatcagcatctgcttctggatcttgagacgtcaaaatcttcggaccatcattcgtaataactaaggtatgttcgtattggcaactccaaccaccatcagcagtcttggcaagccaaccacttggatcactggtatcagcttcccaagtaccagtgttaatcattggttcaacagtaatggtcatcccgttacgaagacggattccttgaccgtgttcgccgtaatgaggcaccattggatcttcatgcatcgttggttgaataccgtgaccaacaaattcacggacatccccatagccattctcatcttctgtgtagtgttgaatcaccgcaccaatatcaccaatccggttaccaggaacacattggtcaattcccataaacagtgacttcttagtaacgtccattaacttttggatttcaggggaaacttctcctaccgcatagctccagcaagaatcactgaaagcaccgtcgacactgacaaccgtatcaacctttactaagtcgcccttctttaagattaacttcttacgagggaacccgtgacaaatttcatcattaacactaacacaggtagcgtacttgtatccttcaaagccaatttgttcagcttttgctccagcagccttgaagtacttccgagcgaattcttcgatcttccaacttgagatgcctggcttaataattttacgaaggccaaggtgcattgctgctaaggctgccccggccttttccattgcatcgatttctcgaggtgattttaaactaatcattttcgcgatctccttatttacaatctaacataaatagtataccacttgtctgccctgatatcgcaaaccgtgctatactatatgaacgttatagatttaatggaggttataaaatggcaaaagcacttgtagtatacgcaaccattaccggtaataatgaagacgttgcggacattattactgacgctcttgaaaatttaggagtagaagtcgatgaagttgaaatgacaatggctgatccagctgactttgaagaagctgatatttgtgtgatctgtccttacacttacgatgagggagctcttccagaagaaggaattgacttttatgaagacttgcaagaagaacaactagcaggcaaagtttacggagttgccggctctggtgatactttctatggggatgacttctgtgtcgccgtcgataaatttggggatgcccttgccaagacaggggcaactaagggcgctgaaaatgttaaaatcaacctcgcaccagatgaagaagacattcaaaagctcgatgccttcgctaagcaattagtagaaaaggcggctaaactgaatgattaaggatctgtgggtaaaatataagtcaatcattgcctaccttttctggggcgttgtcacaacggtggttaacttagcagtattccagattttgagtccgggacttcactggaatgttgcccttgcaactgtaattgcgtggtttgcatccgtattagttgcttattttaccaataaagtctgggtatttggttcccattacactaccgttagtgactttattgttgaaattttccgatttttcttttatcgtggattgactttatttatcgatttaataattacgtatgtaggtatcaaagttttgaaattcgatacacctctccaacaatttatcgttaaatttattgataatgtcattgtggtaattgctaattatattttctcaaagtggttaatcttcaaagataaccgtgatattgcagataaataaatgataggattcggactgtaaacttacagtgcgaattttttatttatcttaaaaattccaactataataaatacgaagaaggtattgacctaaaatgatgaaaaaattcctaccaattgaaaaaatattagaagcttatacagcaattgctgacggtcacgttaaacttgaaaacgatcaagcactcgtaacctcttctaatgaagcgaaaacttataccgtcaccctttcacgacaatacctatacttcaaatgacaatgcctcatactggcaaggctatcttggctatcccggaattgctgtcctgatgcttcaaggaaagttaccttatgataaggaattagctcaacaatttgctggagttgattggaataaaatcaatcaagaatataagcgtaattatgcgcaagctgctgatgctgttatgactgttaaaggaattgataagaagaaagcagagacggaacttcatcatgtttacaatgtcctaaagcaattaccaattatcgttaaacgtggatcattacgatcacctaaagcaaactaaaggtgaataagagactactcttttacataaaaagctctcttattcaccttttttattgttgtgataagtatttttcaacaattttaagaatcttttcgcttgcgtgcccatctccaaatggtacttccgctagttccatttgccgatacttcttctcatcatttaacaattcaaaaaccgcttgttgaatcgttgtcggatcagtaccaacaatttttacgccccctaggctgaccgcttcttgacgttctgtttcatcacgtaaaagcaaaagagggcgatgcaatgctggagcttcttcctgcaaaccgcctgaatcagttaacagaatcgaactccgggcagcaatatttaagaaatcatgatgatttaatggtgtaataagatgaatccggtcatgatctcctaaaatatcattagccagtaattcttcttctggatgaggatagacaggaaatatcaggtcaagattgttgttagtttccacaatatcacgcattgtatggaaaacacgcttcatgggggcgccgaggttatctttgcgccgcattgtcattaataaaatccgattatctgctgggatggactgcagtaaaggatgcgtaaaatcttcttgtaaattatgcttcacgctatcaattgaagtatttccagtaacatagattcgttttgctggatggtgctcttgcaataaattatcgcgggcacttgtcgttggcgcaaaataaaggtctgctagattatctgtaaggcgccgatgcatttcatcagggaatggcgaataccgttcataagtacgcaaaccagcttcaacatggccaagtgaaatatgatgataaaaactaatcaaactggcagccaaacttgtagtagcatcaccagccacaaggatcatatctggttgtccagcattaatcacattatttaagttatgcaacagttggctcaatagttcaacttcatttgtacttgttacgttcgatgaatcaacactgaaatcaatttggaaattcaaatatgccaacgtgtcgtttaataattgtgaatttcccgttgcaacaagaactggttgccaggtcgcaggattttgatgcatcaatctaatgatcggcgccaacttcaaaacctcagcccgcgtaccaaacaaaaacataatcttatatggtggctgcattaatgactctcccttcagcttttaataaaaaagacgtaatcactaaacaaagcaatcacgtcgacagtgcattatcaaatggtcccatccggatttgaaccggaatcgaccgcttaggaggcggatgtactatccaattatactataggaccaaactaaagaatattatcgcatttacgaaggatttcgtaaagacggtaattattcttttttagttttcgttatttttacgacgatgcttcaaacgaattcctttatttttgcgattctttttctttcgccgtttctttggcttagagaatccactgagagtttgattcatctttttatgggtttccccacttaattgttctttttgcaagtgacgactagcctgctgtttgattgaaaccacccgttgaccctcttctggtttctggttggttaatttattatcaccaatgtagagcttagttagttcatagtcactatcagcaagcaacttcttaaggtcacgaatatcatgatcatcacctaaactaagtgctaatcctggttctccttgtcgcccagtacggccaacccgatgaatataggtattgagcgatgtcggcaagtcaaagttaataacggcaggcaatttaggaatatcaatgccccgggctgccaaatccgtcgtcaacaacaacttgatttgccgcttccgaaacatccgcatcgctttttcccgttgtacttgtttttgtctaccgcccaaggtatctaccggaacatgttcgtgtcgcaaccgacttgcagcatagttaagggtgcgggtactgttgaagaagataagcgcccgaaaatctttaatacttgtcagccgacgtaaagttgctgttttttgcgcattggttcgtgcacttaagtaaccatgttctaccggtccctgagaagtatcctcatcacgaacatcaatagtttcaatatcgcgaccaaacatcacattcaattcatccagaacaggagattttgtagcagaaaagaatgctagttgagtagataacggggtcgcacgctcaatatcttctacgacagctaaagtatcgtcttgaagcatgtcatcagcttcatcaataaccattgtcattaaatggccgagttttaagtgatggttatcaagcatatggagtacccgtccaggtgtccctactacgacatcagggtgttggtgtaaattcataacttgtcgccgtaaatttgccccccctgtcagggattgaacgctaacgccaattaaagttgcccattcacggattaccttggttgtttgaattgccaattcttgtgaaggtgcgagaaccaataattgagttccctcgcctggcataatcttaggcaagagtggcaacgtaaaggctagggtcttaccagagccagtcggtgctattccaaggacagattggtcagtttttaatgccggcgcaactgctttttggattgcagttggttgcttgtatttttcatcaaagtgtttttgaaattgttcgatcaaattaaatcatcctattcttgatcgttatcagatgggaaaactagttgagcagattgacgaagggagtacataactgagttgaccgtcttagataattctaaccaatgcttgtacttcttcatttcttcttcatcatcaggattgttaaagaggtctgcgaaatcattcatttcatcagtcattgagttttcttcaacgggcgcttcgattgggtgcgcattttggtcagcatcataataagtaacctttcgcgtatcaaaaatactatcaaagactaaagtatctttcaagccgtaaacttcagaataaaggtgggagttagctgtcttaccaaagttgagagtgacagtaaatttgtcatagttaagaattgcaacccctttaccatcaaccccagttttagtcagagttgggaaataaactacagattctggttcaccgtaaatagtaacggccccatatacagcatatacaccgaggtccattaaagctcccccagcatacttaagggtaaaaatatttggatatggttcactgccattaagaactttatcaaaacgtgatgagtatttcattacagtgatggttgctccttgaatataatgttccttcatctcatcaactttcttcaaggcagcttgataaatcttggtatggatatgacgagctgcttcaaccaaacgtgccttaggatgggctgccaataatgattcaatcgcactgtattcacttggatttacgaaagctggcttttcaacaataataaatttatcgttttcaattgctttccgtgcttgttggtagtgcaaactatttggtgaagcaatataaacgacatcaaaatcgccctcttcaaagaacttatcaatgttatcgtaaaattcagttgccccatatggcttgccaaacttctcagcatgttctaatgtccgagaatagacagctgtcaattcatattttcctgttttcttggctgcatctaacatctgatcagtaataatatttgttccaataacaccaagttttaacataaaatcaactcttccttttcaaatatttctttgcttacatctaattttaacaattattgcgcgtttttaacagaaatgaaatcttctgataatagaaatgtgtgtataattagttatgttatagaatgacttatcacttaattgaggagactgataaaatatgagaaaaaaaggaatgttacttttcggcgcgggactaatggctggactcaccagtactttagggttcagtcgtgcgaagaaaagcaataatacgatctcgttacctatcttttatgcgggcacatggcaatattatgataaagaacgagatcgctctcataaaataaccatctctcctgaattaaagctcggtatcgataaccagatcattccggcaacggttcaacaaatcaaacctgataagttagttttccttgatcgatttggttatcacattactattcgggcaaatgaacaacggccagtttcattaaccgatgaagctgatgaccaagtttatactattcaaccattaaaataatgttggcgctgtaagacagcgttttttatttttaaattatttttgagcgtactgacgatgtgccggtgctttataattttgcataaatgccaaaatctggtcaaactggtcactaaaacagatactatttagataaggatcttctacaaagcccgccttattcatttgcttaaataggtcgtttaacgaatcataaaagccattaaagttgtaaaaagcaactggcttatgattatccccaactgttgtccatgaggcggcttcggtaatttcctctagtgtcccaaagccgccgggaaaagctaataacccatccgcaagatccatcatcgtttgcttgcgaatatccatattagggacaattcttacatcttttaattcgttataaatggctccacgttcagctagctcagtagttattaccccgtgaacaacgccgccattttttaagactgtccgagcaagggttcccatcaagccaaacgcaccggcaccataaactaattcaatatcgtgttggaccagccattcaccaaatcgttgtgcttcatgattaaatgccggattatttccatcacgcgcaccacaataaactgcaattcgtttaatcatacaactactcccctttaatattttttagagaatctaattgatgcttaattgttgctgccgcactcttaatctcttcttcttccaatgggtaaagttttaagagaagaaggttgccaattccttgccgaccaattaacgctggaaaactaatgtaagtggaatactgcggctgataaattgcaaccggcaacgctaattgttcatccgcaaaaattgccgtaataattcggagagtccaagcagtaacagcactaacattgtaccctaatccatcgagagtgtaccaattactaaggttcgccttaattttaagctgactttgatctaagtgatgaccattgattgccgcagttaagggttgtccattcacacgaacagttgaccaagcaaatacctgatgaccatcgtgttgaccatagacaaaaccagttacattggcagcggcgacctttgcggcttctgcaattgcccgataaaggcgcgccgtttcaacaaccgtgccaatcccaattacttgcttttgcggcaagccaactttttgctggagaacagcagtaattgcctcattaggattagtaaggttgattaagatcccactaaaatcactcttaaaaatcttattaccaacttgtaaggcctgctgatagctggtctcaagctcagccattggttgttgcttcatcaaagcactctttccaaaggcggtaataaggatatccgcatcggctaaggcagcgtaatcttgaataattatttttgtgtgggtcgccaagaccgtttgggaatcatttaaatcagtctgaattgcaatagctagttgatctttttcatcaatcaaaactaattcatcaactcttccgttcattactaattggttggctagcatttcacccacatgaccgaggccaataattccaatctttctcatttttagcgcttctttctatttcccgggaaataacgaaagtgaaaacaaggttattaccctactttaaaaagatagagactaggaaataatctcctcagtctcttttttacttttcctgaaaatcctgaacttctggaaaatcactaagaattacatcacgggcaccctttgagaaatcaaaagttgcttgagcattatagctttcttgatgatctcctacatataatactacttgcgttggttgcaagtctatttggacacctaactcaatggcagctttaaccaattgttgaacatcatctgagtaaacatcgctgattgcttgcaatggatgttggaaattaatatttttcgtgtaacgatcattggcaatttttaacccaaatgataataaatcaccattttcaagttgatctgctaactgaccgctaagagttagcgaaggatcatccactcgtcgttgtacaaacttcaaagcaagctggtattctcgcggagcattaaactcaacaataaagttttgcaactctgcgattaactgcattgcttcttcatgcatccacggtaattgttcctttggcttttgtaaggccactccattattccgcttttttgcttccgctaatcgttcctccaagttatcaggtaatggtgaaagaatactatttaaaagcattaattcaaggaagttaatcgtatcgtcactaattcctgttcgcgacaacgggtcaaggtcaaaattacgaaattcaagataatcaattcccttatgtaaggccccatcaatatcatgcatatcatggttatgccgccgtaaccgtaccgggccaaagaattccttcatactatagtaagtgccattgtccatgaagtgctttagttctgcaaaatactggtcgtatgaagtataggtaacttgctcattggtaaagttatcatccccataatcactacaacgcaaactccgaactggcagctccaaatcctctggaatactatgtggcatatcttcagaaaccggacttgctccatataagtacgtaaataaccattgataaaggtagaacttttgcgctaatttaaagtaaagatgattttgaaaatcaatacggtttggataccggtccgcataaaagcggtgataaatctcgttgattaattcaccatccaaactaaaattaacatggacatcccctaaaatttcttgaacaataccatatttcttccctagataatcatgagtctcttggtcccatttcttagtaaatgcagtttgtaaatattcaaggtcatgctgataagtcggtcctggcgccatacttaacggccataatcgttcatcactccgtaaatgtgagataacaatctgctctaacatttttagttgccggactgcatttttagctccaacaactggacccgtttcaaagtccatcatgtcatccgtatagcctgagttcaaataaatattatattgccgtgaacgcagattttcaggatatggataacgacttgcccgcccattggtcaaaattcggtgcttctttgcctctaaaccaaactgtgaagaaaaaagtttggcatttaatgacggttcttttaaagctgctttaagttgatcataatcggttcccatccaagaatccctccaatcaatcattttaattttattcaagttcaaccataacacgtttggaacataatagacaataacaacttaattatttcactggataatcacttcaaaatagattaacgctttctgtccttaattataccaatctccgccaccaaggaacataaaagtgctgaaatgctttattcttagcaaagaaatgattaattccgctatttttacactgatgttcttttaatgaattgacataatcagcataaacttctattcgctgcgaatctggaacgccccgccatgcgataacatcctgcatattttttactaagtcagcataattaccgccatcatcataatcaataggtgcctgccaatattttttagcaacccttcgaagctgactatcggtcggttgagtaatatcaagacgttgatgagtgtgacgatatttaccagttacataatactccccatagggaattccatagttaaaagattctgtatcagcgatttgccgtaattgattggtcgaataatgcgtggggtctgaatcaactcttccttggttatcaaagcgataaatattccattgactaacaaactttcctgtttcgatatcaacaataaattcaatcattcgggctggattagcataccgacgatacgaattacgaactaattgaaccttcatattagaggggtaagcaaatttatgatgataacgattatggtaattagcaccagttttaaagtctaatttaaagtgattatcgtgggcataggaaagcaatcgttgaaaatctgtcgcttctggtgaaagagagggacgctgatattggcgaataaaagtgatgttttgccgatcaagataactgcgaaataaatgaattttgcgtcctaacaaatctgcttttagccctttcttccctgaataagccgtcacaactagatcacgaaaataaggatagaaaaaactggtaggggctaactgaggtgaaaattgatatacagttggtgaaaattgaagaaatccatagttatcaatataagcttgtaaatggtgattaataattaaatcaagctgttcatgagcgttaagaccgctttgtttcaaggttcttatataattaacggaaccaatttgatttgcttttatcatgttatttgtcataaatatcatttaacggttcatgaaccatcgtaatatgctcgcgctcggcctccataaaatggtcacccacagattcaaaaccatattttttgtaaaagtcctcaacataggcttgggcatgaatagttatcttaaagttggggaaattcactttgattccacttaataaatgttcaataatctttccacctaaaccaatcccgcgtgcttgtggagccacaactacgcgaccaaaagttacaacatcattctgaataaaataacgtgcataggcaactacttcaccattagtagttgcaaaaacatggtgcgcaagtgggtcactatcatccggatcaggataggaactctgttgttctccattaaaaacttgtgctcgtaacttaagaatggcaaaaagttcattaactgttagttcagtaaattgtttatcaaaccattgcataatttatccctcctataattttatatattatacaaaaactagtaagttagcataattttcccgcaaagcaattttattattaaatttatggaatataataaaggtaaggatttatttatgaagggagcgttcaataatggataatttttcacctaatcgtcgaaacgttgttgatattaccgacttaaataagtttttaacaaaaatgtatggtttaatgaccctggcagtattgctttctgccttaaccgcttggctcgtaatgactgttttcgctcagcaatttactgcttttatggtcaataaccgctggggaatgtggttaattatcctcttgccaattatcctaacgtttgggattaattttaatgctacttgtagtcctggtctttgtctgttcctattaattttaacagcgatagtctacggaattacctttgcttttatcgcaggcgcttatgctggtactgatattgcaacagccttcgtttcctcagcgggtgtattcttaacaatggcgattattggtactttttctcaccgtgattttacgcgacttggttcttatgccagtgcggccttaatcggcttgattatcgccatgctggttaacttttttgtgcaaagtccaataattaattatctgctttcaatcgttgcggtaatcatttttacggcattaacagcttgggatgcacaacgaatgaaaaatatctataccgagtgtaatggtcaagtatcatccaatgggctagctgtccttggtgcattacagctttaccttgattttattaatctctttattagtttcttagacatttttggatcaagtaatgaaagttgaactactcccacttagctaaacctacggtttaatgcttgaagtgggagattctggaaacatcgcatacttaccctaccgattctgaacgaaccttcaagcagaggttacgactattagccaaggctcgtcccgagcctaactttatctatcggatagctaatcctttttgcaagatgacttgtgcagcgttaatatcacgatctaaatgtttaccacagtttggacaatcccactcacgtaccgctaaccattccgatttattcaatcctaaccgatgattattcttcccacaattagcacaaatttggctagtatatgacggattgacctgaataagctttttaccgtaccagtaacacttatattgcaatatatctactaattttgaccagctagcgttagcgattgctctagctaaatggtgattcttcatcattcccttagtattaagtttttccaacacaatgatgtcgtactttttgaccaatttagtagtgaatttttgtagctgatccaaccgttggttggcaatcttttgccgatacttcgccaccataatacgagctttctgataattcgtaaaatcgtctaattgccgtggaactaacactttattatgatgatcccaggcgatttcctgctgggcctttaagaaccgacgactacgcaatttctcccaacgatacaactttttacggtatttgtcttcaaaatgattgatcggttccttgcatccatctgaaagattaagtaatgacttaagtcctaaatcgccaccaatatatttacttgttttaggaagagtttggttttcgctttccactaaaacagtaatgtaatattgaccagcaacgttcagacgaacagtgacattcttaattttacccattggcaatcgaccagctctaaaatagacgataccgagttttggtaactttatatgatggcaatctaaaactttaatattgccattaacgtactttgaattgtagctctgagaatattttctggatttaaatcgagggaacttattttgacctttaaaaaagcgttgaaaagcatcagctaaattgcgattagcactttgcaaagcagttgattctgcttgtttcaaccaaggatactcaaccttaagttgtttcaacagattattcatcccaaaggcattcacaaatttagcttccggattattcttgcgccgttcaatttgcatattaagcatttgattccatacaaaacgaacacaaccgaaggtttgccagagctgatttcgttgtgctgaatttggatagatgcgcattttaacagcttttagaaccattattttctcccttgactttcaatatatcgttttacaacttctaaaagcgctccaccagtgctaattaagcaatatctttgtgtccaaaaggctgattcccaaagatattgcttgatttctggaaattgttttttgaccattctggagctagacgatttgtaatcatttaaaaatttagccatttccgtatgaggcgttgctctaaacaaaacatgtacgtggtcctgatcatgattccattcttgcaaattaatgccgtatgcttgtctcacaactacaaaacgatgtttaagatattcagatatttcatcgttaattacttttcgacgatacttaaccaccattaccaaatggtaattaggtaagtatactgaatgctgatttctatctaattctattgttatcaccacattttatagatatatactaaatatatcatagaacaaaagaaaaagcactaacgtgctttaagagagcgattcatcccctacttatagaagtgggggtattctcgcaaatttatggataaaatcaatagacaaaaaagtattaagagagtcattaagcatccctcctaatataaatataagatagattttaataactctccactattacacttttaatcgtctaaagtaattattttttcaaagcgaaacatttcattattagtatcatcctgagtttcatagttaagatctagatggctttggttataaaattctacagcagcaaagccacaacgattgatataaaaatgaatatttcgtttatcaaaatacggggtacatgtctcccaaagaactgtttgtggatatttctgctctaatgcagtccaaattttataaccaattcctttattttggtgtgcagtatcaacgtataaaaagtctaaatgattgtgatgtgtttgatcatcgatttgtacaattgcgccacccacaatctcatgatctacaaccgccttaaatccatgggcattatcacaagtaagagatacataaatatcttcagtcggtaatacatcttctaaggagctatcctgtacttgagctgcttgattaaacgaatctttcattgcaggaacaaaaattggtaaatctttttcattaagtggcataagcttaaaatccatcgttttacctcctaaaatacataaaactaaacaactaataatttaaggaattttaccatttgctgcaaatttttgaccacttattacatatacaatataagcggtgacaaatataatatacttagattagaaaggaagtgggaattatgaaagtaaactgtcatatcgaccctaatattgaagaggaacacctcgatttatttgtccgtgaaatgaatccccaaattaataacctcttaaaaggttttacaagtaccgaaccagtattatggtgttatgacgccgatcaaattatccccattaaattctcggatatctttgaactaactgtcgctaagactggtactaaaatttcaacaaaagatcatacctacttttatcgtgaacggttatcccacttcaaaagcaatcttccgaatgattttattgaagcatctgtcagcactatttttaattatcattaccttgatcaccttgagttattagataatggtttgatagatgcaattttaacaaatggtagccatattcagatttcgcgacgaaaaatcaaaaatttgaaagcgaggttaggactatgaaaaaatatgtcaaatatacgattggtttctcaggaattggtgttctaattggcttagcaatctctttagttttcaactatcttaacggcagtaccacttactacccatcatcccctaattttgttaaccaattcgctcatccccttaacggcgtaactgtttctgttattttatggatgctaattggctgtgtttttgggtttggcagtttaatttttgaatttaaaaattggtcactgctaaagaaaacgatcattaatttttgtgcttactatgctggctttgcgccattagcaatcctatgcggttggttcccattgacttggattaattttgccattttcacgcttatctttattgtaatttatgtcataatttggcttcttaattggtactcaataaaaaaagagattcgctcaattaatcagcaaatcaaaaagtagttttccctcacatttgattgtaataagcctggactaattcaacaaagttattaatattataagttgttccaaataacttacgagccgatgtcgaccaataagaaattgggtcttcatgatcagttccaccaagataacttgaaatcattgcatgggtccaaacagtgccaccaccatctttggttcctttcgtcacgggcaaattattctgttttaagatataggctgtatagtaagcagcattgccaagctggtttgcaaaagaagctgcggtatattcatgaggcatttcaaactggacaaaatatggattagcatatggccctgctccttctgccatatattttgtatccgcaatattaataatttgttgattatcaataaatgtatgaacaaacactctagttgaactataattttgcttcatgtaagatacttcactactaatcgttgaattttcattcccagtatcatgaattacgaccccacgaggatttccagatgaagtactatacccgcgttgttcaaatatacttgaaatttgtttagtaattttagcgtgtggaagaccagattgagtaaggtaactattgatttcgttattcattttcaactcaatatcggtggcccgaacaaaataattttttccattatagttaatccgtgcgtaagtatcatcgttatcattagaagtcagatagtagcgattgaccttaactaaggcttgatcaggcaggttggcgcgttgaattgctgaaagtgaattatatactcttgcgccactgcttaacgtagccatttcactaacagcatatgaattactaacctcccgcgtatgatgagaataaaaccaactcccaccgattattgccgcgacgattataataagtgatagatatattaaattttgttttttctttctctttgccatactagttattgtaacgaataaatttgaattttgtaggaaaaaactaattatttataagtaaagttaaaaatcccttgccttcataaatactgaaagcaagggatcatttttatttactaattattaatcagcctcacagcaaacatgatatttacgtgattaacacctatgcaagtggtattgttaaataaaaatatttatgatattatacacttacaaaaaataagtatgaggaaggagcaactaattatgaatgtcgaattaggaatctcaacatttggtgaaacgaccccactcgaaaaaactggtaaggccattagccatgatgaacggattagaaatcttattgaagaagtagaattagccgaccaagtaggaatcgatgcatatgctatcggtgagcaccaccgcaaagactttgcagtttcggcacctgaaatcattatagcgatggcggccgcaaaaacaaaacaaattcatctttcaagcgccactactaatttaccaacgattgatccaattcgggtttttgagcaatatgccacaattgatgcaatggctcctggaagaattgaaattatggctggtcgcggatcatttactgaagcttttgacttatttggttacgatcttgataattatgatgaactatttaaagaaaaattggatatgctagttgaaattaaccggaacgaaattcttgattggccaaaaggaaagttcacgccaaaagttgaccacattggaatctatcctcggccaaagaagcccttgaaaatatcactagctactggcggcaatcctaactcgaccattagagcggccgaaatgggactaccaatcgtttatgcaattattggtggtcagatggatgcctttaagccattagtacagctctatcgtgttgtggctgaaaaaacaggtcacaaattaagtgaaatgccagtttcggctcactcgtggggatggctaagcgatgataaggaaaaggcaatcaaagaatatttctatccaactaaattacttgttgatacaattagtaaagagcggccacaatggactggcatgacatatgaacaataccttgaaagtattggcgaaaacggtgttatttttgttgggaatgccgatacggttgctgacaagattattaaaatgatggaagtgcttggcttgaagcgtttctacctccacttgccaattgcctcaatgccccataaagatgtattaaaagcaattgaaatttatgggaaagaggttgtaccaaaagttaaaaaatattttaaggataaaagtaaattgaatgacttttcaattaaatggaaagaataaaaagatagacgccgatgagaaaagatttttctcacctgcgtctttttattattagggcttaatattctcagttgaaagtctgtgccgttcaaatggaactagggatatgttgaaggaatatttcccaggaaataatcatttaacggcatctttaattggaagataattaggattaagattattctcttcagaccgatcaacaaattttgcttcagtgattccatattcatctgcttaaatttcaatctttcctaaaggcgacgagtaattaaaccttgcaatcattatgccgtttctatttagtcaaaatgcaaaatttcatttacaggacgacgctctgaatggtagctattaattgtcgtatcagccgaataaccaagcgagataccaacaataaaccgttcatcctctggcacatctaaagtttggtgaagaatcgctgggaaacgaacgctgttataggttggaatcgttcccaagccataagcagttgcagctaacataatattttcagcaaataagcccgcatcaaaaatcgaccaatctggtgaagctttaggaatagtaatataaagaattacaggcgaatcatataaagtattacaggcgaatcatataaagtattactagcatttgtcatcttttcatgagcttcatcaaaattagcaaaatgatgaacaattccatgccgccattgcttcatattatcttgggtttgcggtgcccaatcttcacggctcatcactgacaaatctgaatccccttggttacctgcaatatcttgatcacgataagcattcttaatttcttgtaatgtatcgcccatcgcacaatatacttgccaaggttgagagtttacccatgatggagcacgttgagctaattcaacaattttagtaatcattttcttttcaacgggtttgtccgtaaattgacgaattgaatggcgttgattaattgcatcttgtaattccattagatgactcctcctaaatcacatactcttactaaagtttagcatatttaggtttactttaataagatcttgtattggtcactttattttttcgccgcactgcttctctaatcttgggatagcgaaccattaagcaagcaccataagtaaaactagttgcgacatttaacacccagatgaaccaggcgttgtgactacggaaaaatgcgattgtggataagtctttaagaacctcttcaaacagttcatgtgatatttccgtagcattaatatgggccccataaaacacttcaacactgatgccaattgcaaatgaaacaagccagcccacaagatacggccaattccttttaatcttcagaatcggtcgttgatgggaatctagtttattagtgtctttaatctgcgttttacttgtctgtagaaagccaatcgtagctcctaagattagaagaataattgtaagtccagctgccgttaaagatcttacgttttctaagctcaagaccatcataattgcagaatacactgggataattattagctcaaatcgtgttaccttttcatattcaaatgttcctttaatgaatttatagattaatagaattacaaatatagtcattgataataccctaacttttaagtttgtatttgtattgtactatatgactaagatagtgaaacggccaatttcaggaataataatctgagatagctaatgttagcaccaacatgtcccgtaacaatagaccattttcgtgaataggttgtccgtaatttttaacaaaaaagttccttttaatctcagtaacgcgaaaacctattttctggtaaaggtataactgcttaaagctcgtactcccagtgccaatttgcaattgttgataatgatgtacctttgcaaagtgaacggcatcctgcaatagcctggttgctattccgtgattttcaagccgtggatcaacagcaatattctttatttctaatttatccgatgtaagttcttgcaaaaccattacagcaatgggatgaccatctttagactgtgcaaaaagtatccctgattgcagataattttgaactaatttcttacttggatcagcactgagaagcaaatcccaatgttcaggagttactgtcgttactaattctatccttgtatcgttattagtcatttgacaatccctcatccatactattgatagttagaaactgctgatgaagctgttttgaaaatttcattactcaaactcctttttctattaagactgtttgcacacactttcttattaaggagactaattcccacttacattacttaaggcaacaatccagcaaccttatcgcctaacgttggataaatcgccattactttttggcgatactcatccccattaatcttcaaaccaataattggcaagaagttattaatatcatcagccgcataatcgccaatttcacttgcccctaccaattgctgatccttaaagactaaagtaagggtactgatgtgatcgttttggcctgcgtaaaggctaccatattttagcgcaactgtcttaacctgatattgtgagtcaccagtgacatcatctggattaacaccggcacgggcaacctctgggaatgtaaaggctgcttgaccaattgtcgggtaaacaatatcttgatccgttttacctattaaataatcaaaaagatattgaccctcaaattcagcgaccggtgttaatttaggttgtttccgattaataacatccccaattgcatacacaccgtcaaccgttgtcatcaagtgaccgtcgacattaataccatgacgatcatattcaatatcagtattttcaagcgctaatttttcgatatttggatgacgaccggttgcatcaagcacatagtcagcctgtacttcaccatgattagttgtaacgagcaagccgtctttcccttgagttactttttgcgtatcagtattaaagctaaattttattccccgttgcttcatcgcattaactagcgcttcatcttccgccttggtaaattcacgaaggacgcggtcagaatgaacaacgattgttacttcagcgccagcagctgctacaagggttgctaactctaagcccacaaagccagcaccgattatcgtaatccgttgtggaagttcttttaacgagaggaggtcataactggtatgaagatactctttacccgaaatattcagaatatttggtgtttgccccgtcgcaatgataatacgatcggcctggtattgatgaccgtttacactaatagtatggttatctacaaaacttgcgtagccgtcttcaatatcatgacttttcttaataatatcgcgagtttcgcctggccatggatcaaaccgcttaagcttagtctgcattaatgcttcccaatctaattttgctggttgactaatgcctcgaccaagaagttgctgagattggagaacagtccgggcagctccttctagaaaaatttttggttcgcacccatagttagggcaagttcccccatattcgaaaccctcaactaccaatactttacggtcggttttagccaaaagattagccattttataggctgctggccctgatccgatcagaatatcatcatactttttcatgttcatccctccagattcttacattattgagtcaagtgtaacttaagtaatgaaaagagtacaaacgttttgtttcgtcgtataaaaatattaatcaaaagtcaattaatacttatcctctttcattatgaaagcgaattcaactaatgatttaacagtattttgtctaacctattgtatgatccattcaagaatgatagattagcctttaattattaggaggtggtctacatgttacaagttaatacattatttatcatgatcgccagtattctcgtgttattaatgacaccaggactggcttttttctatggtggtctagtcaatcggcgccatgctaataacatgttgctaactgtttttatgatgtgtggcttagccgtgattctttggattacagtaggctactctctttcattttccggcaaccattggggaatagtcggaaatttaaataatacattaatgattcatgtgccaatcgatgctatcactaaaactggcattccaattggcgattatgcaatgttcatgatgatgtttgcaattattaccccggcaatcttttgtggatcggtcgtcggccacggacgctttaattttttaataatgtttaccatttgctggtctatctttgtttactacccccttgtgcatatggtttgggcaccatatggactattggcaagattaggggcagttgactttgctggtggattagttgttcatgtaaatgcggggataacggccttaatcctttcagcctgggttggtcgacggaaagatgttcattctcaacgcaataatttatcgtgggtattaattggaacagcccttttatggattggttggtacggctttaatgctggttcggccctcgccgttaatgatacggccgtacaagccatgttaacaacgaccatctcatgttcaagtgcaatggtaacatggatgttattggatcgttatcagtttaatcatgttaccctagctggtgtctgtaatggtgcaattaccggtttagtagcaatcactcctggagcaggctacgttacactaggtggttcaatgattattggaatagtcggtgcaatcgttagccaatactttattactaagatcaaaccacaactgccaattgatgatgttgttgatgcattcggttgccatggggttagtggtatctggggaagtattgcaactggtatttttgctagccatcagatcagtcatctagtacctaatgggcttttatttggtggtggtttgcaccttttgcttgttcaaatcttcgttaccttattgacaattatatttattggtgtgatggatattatcttaataaaactgctctcaattgttttaccggtttcgattgataatgaaaaactggcggcgattcaaagtaagtgaacttaaatttttactgcaaaattagattatttacgtatatattccttttagaagcaaaaatacataaggagtaaatttatgaataatctatcacgagaagaacaaattgccttaatctatgacaaatggcaaaagatgacaattactagtgatccaatgtttggactagtaatgcaaaataaagaaatttgtttagagttaattaatagagccctgccaaacattaaagcaaaacagattatccagttagacacccaaaaagatattaatattgttagtgcccatcgtgttcgctttgacgtttatgttcgtgatgataaaaataatatcattgtcattgagatgcaagttaataatcaaaataacataccagcacgcttacgttattaccaagaacaggttaatcatgagctattaagacctgaaaataattactcagtactcaataattaccctacttatattattatgttttgtaattttgattattttaagcagggatgggcactatatgaatttaatcttacttgtactagagaccataacttgaaatttggtgataatcggacagtcgttatcttcaatgctcttgctaaaaaatttgataaaaatgatgaaccgattaagaacttccttgctttaatgtgcaatcaaggcgacaataagaatagatttattgcacagattcaagacgaaattgataaagtcaaacaagatccagaaaggagaaatggctttatgaagtacgaattaaacttgatggacgctaaaatggaagcacgagaagaaggaatggcaaaagcaaaaagggaagatattaaaaagttaattgactctctttatgaacttaatattaaaccagagatcattaaacaaaaagttatggaaaaatataatttaactgatgatgaatatgataagtttctcggttaataaagggagcgagacagaagtcactcgtgacttcgtttttcgacgcgaagctagcctctgggagcccccgcaagcaacaataggccttcagcgttcgactttgccggacgctgaaggccattgttgtactgcgctgttcgtattttatggaagtgacctaacttatgtcacagctcttttattgatgggtccgatatccagctgcctgagcatcagctaatgaatcaaaataaacgacattttcaggagcaatcccagaatatggatattgccccggtaagtagcaatacattgttgaacgatcaccaataattgaatttggttcatagttatccggatcaacccacggctctggttctttaccactcgcgggggctgtatttccatcattaggctgttgagttgttgaaggaatcgttggactactattatttgaatagctcttctcatcattcggttgctgagattgctggccgattatcgaagacccccgttgactttccttaccgctggaagatttgatgacagaactagttttttctttatttttagattcttttgtcgattttttcttcttatccgattctttagttgttttaactactgcatcctcttgagtctcctgtgcctgattacgactactaatgaaccatccgccaccaattaataataaaataactattatccataaccatggtcgacgataaaacggcttccgatgttgatttctgttcataactggcctcctttatctttgaactttcgatttttaacaaaaacgtttccaaattcattatataaaatcaccatagcgatagataggtaccttcaacgggattaattattttttagagaattggttataggatattcataaaagataaacattcttcttaaaattattaactataattaactaaatactgaccatcatcaagtaaaaattgcttaaataatggcagcgtaaattttagctttccatatcctgctggtgttatgagttgactatccattaaccgccgacgatacattccaatataaccaggctttttctttaattttgttcttaagcaactagttgaaacagggtactcagaagctttagccatagtaataacaaattgctgatccataatagataattcttcaagcatcttactataagcatttcgacttaattgggcttgatactctggctggatactatctatagttttcatcgtaatgtgtttatccggtgattcccataaaagataaccaagcaattgaaaggcatatgcatatccgtctgaaagaagagcggcgcgacgaaccacttctggcgaaatttccggatctcgtactttcaatgcttgttggtattgcgctctgatatcatagtaattcagtggagaaagacttattcttccactacgtaataagaaagttaatacatgattattttgcaattcttgaacatttttgggtaatccagtcatgattattgagattggtaacccctcactaatcatgacttgatatactgatgctaattcaaccattcccgttacctcttgagcttcatcaatcattaccaatactttctggttatttttgtctaatatttttaacattttttttaatacaagttgaaaatttgatgtttgtttatcattaagagtgaattttaagcctaatccgcctatttcaaaattaatatcggagagttggtcgaatacttttttgattttatttgttgattgttggtaaatcatttcagccaaacgtcccaccatattatctccaataattaagtgaatagttatccacgtcggatcttgatcaatctgctttccaacagaattcataaaaactgtttttccaactccacgatttccataaatcaaagtagttcgataaggagtatcaagcgctttaatgtctttaaccaattttgattgtacttcttcgcgatctaataacacagttggttgaataccaaaacttggattaaaaggatttttcatattcttttcctctattttatatttctaatttaattttatatctgtttatatctttgctcaagttttatatctgtttatatcttaaattttatatgtgtaaaaagccaggtaactcccttctctaaaaaagttagaaattacttggcttttttatcaatctaattttctactctaataaaagtgatacttatttcatcatatttgatatttagaactagtaatctttttagctaattcagtatttactaatcgaatagctgatgaattcttataagaatttcccccaaagtttaaatcaccataccaacaaattttttgatcaaaaacacaaatattattaccaatttgttcttttaacttaaaatcgactttatttgataaaagtttatagtcacaatttctctgctttttacccaaagtaagggaaatctgactaaattttaccatttcattcaacatttcaatttgtttttgattaatcctttttaaacaaataaaggctttcttagcattagctagatcttgtctccatacctgcaaatagtcatttttagtatagtaagcagttgaataactattccattgcttactatggacaaaactatatccttgttgcttatagactcttaccctcttccgatacatctttgcaaatgtctcatcagcaatatcaacataatcatatacacgtaattcgtcttttttatctaggcttcgttctaatcgaccaagatattgctttgtattacctttccaagaaaaaggtaacgttaaaaataatgtatctaaacttggtaaatcaaatccttctcccacatatttgccagtcgacaaaagaatatatgggtctttaatttttgataacttaatggataatttttgtgttccagtagtcaaatatactttgctatttttctgctttagttttgcgtaaagttcattaagatgtttaattcgttcactcaacaataaaatatgtcttccttcagacaatgcttggagtgcgtcctttactatttgatcattacggtcattattttcagcaatcaaccttatcttttgcgcataagtatcacgttctaatttacttttagcttcaagaaaactattataacgcggatatatataacgagaaatcaaatattctttttcactatcttgagcttggtagataatatttccacaacgataatacataaaattttctaatccatcttttctttcgggcgttgctgttaaccccagaacatatcgtgtgtttgcttctactaaagttttttcaaaggttaccgcagaaatatgatggcattcatcaacaattatttgttcatagtcttgaaatagttttgtacgctcaatagctgataaatggattaatttacgaatattaatgatatcgactaattttgaaggatgattacgagttccagaaataatttcaatttgttttttcttaacgcatcgtccagtcttagttaattctttatatggcacatccttaattttcaaaaatcttaaagcagcatctcgccattgattagcgatgttaacggtagacacaataatcaatgttcttgctttacgccttgcaattagcgcacatccaacaactgtttttccaaatccagtatgagcacacagcatccccaatttatttttatcaattttatttactgcttcttcttgttgtggccgtagggtacctgtaaattcaacattcaacgctttggacagagtaaattgttcttttaaataactatgacaattatcttttaatgacgactctactcctcgtggcaatcgtaaatatttaccatcaatttttgctgctgttaaaattgatggaacatcccacacaggcatgcgcattctttgtctcttaatatattctggattactaaaagtagctaagtttaataatgataattgctcttgacgcgttaaattttgacgattaataaatatttccccagcaataaagccttcaacttttttaggaaaattttgcaaaaacgggataattaatctagagttttcgccctttagaattttcagatctttagtaatttgactaatgaaattttttacttcttcttcactatacttttttgtgttttctaattggtcaaataactgtgacagtgctaaaggctgaagattattatcagtaaaaatagactttttctcttttacatcactccattttaatggcaaagcaatcaaatttccaaatcctttttcaggtaatcgatcttgattaggaatcatacgatcaaatgatgacaaatcaagactttcactagtaatcatcgactctactaaaatcaatttaccaagaaacctagctgtacttgccgcaattggttgactaaaaaatatccacagatgataactattaccagatgatgatatttcaggaagacagttaagatcatatttttggcaagtcttaattactgccttagtcattttataaggttcagcggttgattgatgtttatcaaaatcaaaaactaataactttgttttatcatcttttaataaaggatagatcccgtaacgatgatatttatctgaagaagaaatctgctcataaattactttcctagaataaggaagatattgtttcttcaattttgacaatgcttctttattatttcgcaattgataaaagcttcgccaattttttaatgctggactatatcctttaccattactccacttttgagcaaatacatcaggacgacctgcaaaataatcagcatataatgctagtttttcaccagttgttcttttcttagctataagacttaataatttctgttcactaataatccaatccgtccctttatcagtggtaattgagtaaaatttttctttagtttcgtaatgccaatatgcttgagtaacggtaatgatatcaccgttatttaacgcgtattctttacctatttccatgtagtttaactccatttagctagctgctattattacccatcaagattctcgaaactttagattagccaaatcgtttaataacagtattaatatcatctcttaattctttactgaggccggttaaatcttcatctgtaattacattctctgataacagctgcaataaagtctgaaacatggatcttttcgatacttcaacaagcacctcgggcgattttcgatccgcctttatttgtttttccagcttccaaaatttattcgctgccgaaccatcaccatctaatattcttttgtattcctgattaaggcgattcatatatctttcttgccattttggaagcagcttgttgaataattgccaatcgcttttagagatatcattcatttcttcttacctcgtttttactttaattatacgataaatcgttttatgaaattcaacttcttttgcgccttataccaacaccaaagcctaatcctactctaacatgaatccacattcaaagatggtattaaagtttacatagcactcagctcttcgaatttgggtgttatttttagttaaccataattgcatttcatattcatatattaaccacttatctttctatcaatcacaaatattgtttttactgatatattcacactatcaaatatattaggaggcattttaatcatgttaattaaggcaaataatcttactaaaagatacggaacaaaattagctctagataacataaatttacagatcgatcgtggtcaattaattgcttatctaggtactaatggtgcagggaaatcaactactatcaatcttcttactggtttaatgacgccaacctccgggatgatcgcacgccgtcaaggaataaaaattggcgttgtcttccaagatagcattctcgataaagagctttcagttaaagataatcttaactttagatcaaacttatatcatgaagatcatactgaatgggttcaccagttaattagcctaatgggcctcacccattttctaaatcagcgctatggaacattatctggtggacagcgacgcagggttgatatcaatcgtgccttgattaccgacccagatattcttttccttgacgaaccgacaactggattggatttacaaacgcgacttgttatttggaacctccttcaaaagctacaaaaggaacatggtctaactatttttctaacaactcattacttagaagaagccgaaaatgccgatcaaatgtatatcttagaaaacggcaaaattttagtttctggctcagcaaccgatattaaacaacattatgcaccaactaaattagtggttacaacaaatggacataagctacaaactaactactctgagaaacaattaacacctcaaaaattttcttttgatggccttaattgttcagaagttattacattactacatagcaatcaagagtatatcattaacttctcatatacccccggttcaattaacgatgcttttgtcaaaattaccggaaaggagcttcaataatatgattgcgttaattaaaaaaaacttaaagatttactttgctaataagattggtgtcttgatgtcttgccttggtgctttaatttcattctttatttatattggttttttgcagcaaaacctgatatcttcatggcaatcattgcctcatacaaaggaaatgttaggtttatggatgattagtggaattgtcgccatcgccggcattaccacttcatttcaagctcttggacaattagtcaaagatcgagaaagccgaacatgggatgatttaagtctaactgatttgacaccgttccaaattaattgtagctatttaactgcaacaatatttattagcacattaatgcagattattacattcttcatcatggcagtttactttattttagtagatagtattactattccaactactgcattgcttctcggattattttttattgttttaggtgcaattggcgcaagtgctgttaatttaattattgttgacctaatccattcttctacgacttttagccgcctttctgccataattggcgcagcttccggatttatgatcgctacttatatgccctatggaacattatccaaatcagcacaatttgtagtaaaattatttccaagtagttatgaggctgctagcttgcgaagccttctgctaaataaactaagcaaaaaatttttaccgccatccagtcggtaccaaatgattgaatatctgggtatccacttcaagattcatggttatcagttaaataattatagtaatgcattaatgattgtgggaatgtctatagttttaatagatcttggagctgtttgggcaaatcgatatcagaggaagagttaattgtgcaaattcattttcagtcagatccattactaggtcctgacgatcttaatattactgtgaacgctgttactaaaaacgacaaagttattaacctgcttaattatttagataagtatgatcaaaaaagtagctctttaatcccaataaaaacagaagataggattttaactataaagcaaatagagcttatcaaggtagaggtaaccaaaaacatcctctctttttatacaaaaagcgatgtaattcaagcaaacggacgactatatcaagtattaacaaggcttaacgaaaattttgttcaagtatcaaaacacggcattattaatttaaatcatttactttccctagaagctggatttactggcaatatgattgctaaattaaattttgatcaacgtgccgatgtttcacggaaatatctaccagagttagaaagaagattgggactataaaatgataaatttaaaaaggggtatccgttactttattcgcgggatgggttatggatctattacttatctcgcaattattgcatttctcacacataatatgactgtttctactactagtgtcattacagtgttcattattagtggattgatcggggaattaagttttgtctttcaaacagaactaccgtattcgatcgctctcgttattcacctaatcgggacctttattctatattctgtaatgatgctaatcaatcactggcctcttaattggcaaaccattgtaattttcattatcgtctatatcgctatttggctttttattcgtttgttagaagagcaacatattaatcgaattaataagcaaattagaaacaggcaaaaataaattttgtatcgcaatcatcgcttcgttactaaaatgaggtgatgatttttgtataggttaatgtccatacaatcagatgtttgataacttcttagtttcacatttgcttgtcgatctgtcattttgctgcctcccttaacacttttcttttatataaaacgttaagtacacgattaccctacaaacgcctacttgactatcgaaatagaacatagaatactcgactagttagttcaaaatagaaagaatcaccatctttcaacgttacataaagttcacgttcaaagatggtgaagtggttaatttaactatttaaggttaagttttcaatgcaatgatcgccattattatctcattgaaggctgacaaagatttccgtatatctgttaccttacacctcttacaaaaatagtgaggcgaatcatttaattaactggtttaattcgttgatgtccacagtatcaaggtcaattggttctccacctaaccagtctaaaaagtcaggatcaacttgccctttttggtaatcatcataatactgctctaaagcaccgacaccaccaacatattcaataataccgtaaccacgggctttttgaacatgtggtagctcctcattagtaactggttgaattttttggacatgaagtttaaactcccagccgtccccatagtcataatgaatagttaatttatctttttcatttaataatgagaccgttgctagatcaagcttaacttttgtcatcccgcctggcacaaaatcttctgactgagtataaaattcctgagtctgttcattaattgcatcatacaagtgtcccaagttaccatgaaacatcaaaatcactgtttcagcgagttcctcaattgtactactacccttaatcacgaacgtacggcttgctagcggtttaaaatcagctaatttagcagtaattacatacgcttgaccatagttttgcgggttaatcaactgacggttgccaacattcgttggtatatctgcttgtgctggagctagttcgtcaagcaactgctgaataaatttatcttgatagtcatcttctggcgcagctaattccggttctccatagataatatcgtagcttgtatctagatagtctgcaacatccctagcagctgattgactcacgatccctgtgtgacttagacaaacataaaaattggataacgtaacagaaagaagatcctcatcaatttgatctaacgttccagcgaaaaagatgtttggcgcagctaggttagtagtgaccgtgcaaattttatttttaacatgaagtggttcaaaaattggtccaagatacgacgagcagtcttatcatctcccattaactgaccatcagcactggcgataaactggtcaatcatttgctggttgttttggctaatcgcttgaactgttgctggattatctgctgaggcttttccttcgtcatccgcccaaatacggggatctttaaattgtggcttgatcgtacaatattttgcccccggtcgtggagctttcacctttaccggatattcttcattaaccaattggcaaaatttcattaatacttcctgatcatttccagatagagctaacaataagtagacaagatcattgaaatcctcagttgatgaaaaatcatcattatcgttaagggtttccttaaattctgcttggtggctagcaattatctgcaaataatttttaagtttttcgttttcagcagatgagattggccggtataaattaaatgaaaaaacattctgcattaaccaagtacgttgtggatcaaccaaaaaaggcatttcatttagaaagttaatggcaacttgactaaacttaccctcgcctaatttgtcagtaaagactggcaaaccagtttcctcttctacataataggtagtatgttttattatcaatctttaccagactaagccgccaccgtcgtaaaggtttttggctaatcttaccagtattattataaggtagtcgatcagccaggtcaggactataaaataactgtgccatgatgattgctcctttatttttgaatgtgtgagaaatgaattttattcgcgctctataaaagaaagcgaagggaatatcatctatagtttacagttgtaagaatgtccaagcaagttatgatccctgaacattaatccacagttttagcaattttttgatagtattaaccattttacttaaatcgatattgggcaattttttgcaaataactttggcggcgttgcggggatgaccaggaaatcccgccaaagttaagccacttccgatgctcaaagccaagttgtttcaaggttgtattaacaaatactcgctgaatatcatccccacagaaaaaccgcaagtaccaagttggcgaagttgaagtagttaatacatagcaatgctggacattcgtcaatagccctttaattccggtcctggttaccgtatgggagagatcggggccctctttcatcaccttatcaataaccccttttaacattccgggaatactattccaccagcaaggagttataaaaatcactgtccgacatgattttaagagttctaaatatttgcgcaccaagggatcaactgtccctccttgatgatacaatgaaagttcttccgcagaataagtaggatcaaaatgttccgcataaaggtcaattaattgaaccaattagtcgaaaaaagttagaaattaacgtttgaccatcgagttcatgttggatttgagttatactttttattgtgcaagacccctttatactttgtttttggttatttaaagtatagtccaaaggggcttgcttttttaatttttcgtagaaaaaactgatagcctcgcctgtttgacatggttatcagctttcaagtttcagttataaatgaataatttggatcgttcgcaaatgacgcgtgagtttactatccgcttccaattgagcaagcgtccgcgataatgtttcgggggttgtcccaaggtatgaagaaaggtccttgagtttcaagggtagcttaactttcgaactctgttgatcaaccatcaattgtttcagataagtcactacccgttcttcaatgtttggcagtcccatcagccgtgtttgctgacgaagactttcaatcattgctgcctgtcctgccattagttttaaggtaatttcgctttggtggtgaatcaactggataaagtcttgccgattaagactacagatatcactgtctgtagtcatttctacataactactatggttggcaacccccaggagccaggtttcaccaacataatcacctgtcttcagcattcgttgcacccgttcttcaccatcttcacttagttggtacattcgaccatggccactttttacaatcactaaccggtcatccatgtctggactcacaacaattgttccgcgcttaatacgctggtgatgaaccagctgttccacttggcgctggcgttctaaactcaactgattaaagagcggaaccaggtgaacacaaagttcttctttcattagagtatcctccatcattcgggtgttagaagtcatcatcatcttcttcagtatacaaccccgtccgtaaatcatgccccaagaagcgctgggttaaagcaatttgctttttgatccatgacaataattccgttaaatctactgctaattcgggccactcttctttattgccaagagcaatggccttcgtgataaagagaatctgcgtgtcaaaatcctttaccaaggcaaataattggtcatcccctggcaaatacttatcagcacccctttcttctagcatggtaaattcacgaaactgatccgtcgtcgttggaatactctcaccattctgaactagcagctgattcaggtgattaaatgcttcctgttcatgcgcaatccaatcatcgccatattgggataaaaacaatgccgcattccctttcgtaaacagctttgcctgactaatctttagtgaatgaattaataagttggcaatgatatgacccgtcatcgcccctgccgttggtgtatggtgatcaatatcgctctgttttagttcctgttgatactgttcttcactagtcatctgatagctcctttaccttaattccctgaaccgtgtatcccattttttcaatatttgcttgaacatcatcgggtgaagctttggccaaatctagtgtaaatttaacctttcccgcattgaacagtaccttcacgtcatcggtcccgtcaatggtttcaacacttttttgaatcttagttaggcatgatggacaagttaaaccatcaagtttcatcattactttttccatggttatcactcctttgttattttcattgtaatttagccaccgtaaataaaaattgattatcatcaattttgagaaattcgtttcatcaaccgcatactgttcaaaataacaatcagaatactaagctcatgaatcagcattcctgatgccatttcgatataaccaacaaaaagtccaataaacaatagcactaccgtcagtaaggcaatcaagatgttttcattcatattggcgatggttcgccgtgccaagcgaaaactggtgactagactattcagatctgatttcacaagtactaggtcggctacatccattgcaacatcagtaccggaacccattgccactgcaacatcagctgcggagagtgccggactatcattaatcccgtcaccaataaatgcgatccgatgaccgtcagcctgttgttgtttgagatagtcagctttcccttgaggaagcatcgctgcgtgaacttcatcgattggcagtttagctgcgatctgatgagcggttccttcattatcgccagtcaacattatgagtcgtttgacccctaacgcttttaattgtcgtaacgccgattgtgcctgtgatcgtaactgatctttgataccaaagattgccaattcatggtgatccatgctggcaaaaataacaatcgaatttccatcactcgtcagttgatcaatgagttggtcgagagttgaactggtacctaataagtctttaatcagggttggattacctaataagtactcaccttcaccaatttgcgctcggattccctgtcccttaatcgtttgaatatcggttggctgataatcgtgcttcctatctagcttgccaattgcttgtgccaacgggtggtccgatcgttgttcaactgctaccgcttgatcaataatcgtctgtcggtctccgttcagaacattgacactagtaacaaccggcttcccgacggttaaggtacccgtcttatcaaaggcaatcgtgtcaatatgcttcatccggtccatgacatcggaacccttaaagagaatcccctgacgagcaccattaccgattccagcaacagtagatgcagggacaccaatcacaagcgcacctggacagccaagaaccattacggtaattgctaaccgcacgtctcgtgtaatcaagccaaccataattgctaccaatagcacaactggcgtgtaataacgggcgaagcgatcaataaagcgttgcgtcttcgtttgcgaatcctgagcttcttccactagttcaataattttaccgaacgtagtatcttcgcctgccgcggtagtattcaccgtcaccgtcccattctccaaaatggttcccgcaaaaactgcatctccaggatgtttcttaactaaccgagactccccagtaatactggcttcatttagaacggcagtcccagtcttgatcgtgccatcgactggaacctgatttccagtcttaattaagaccatgtcccccggatcaatgaagtccacatcctcatcactggtattgccatcttcatcaatcaccaccgcggtttgaggagcaagttcggttagctgcttaattgccgaccgtgtcttccttaaagtagcgttttctaatacctcaccaaccataaaaagccaggtaacaatcgccgcttcgttatattcgccaatgataaaagcaccgatcaccgcaatactgacgagaacatcaatcgatatcagccgtacctctaatgatgaaatggctgtgaacaaaatcggcaatagaccgatgacccctgcaatggccattaggatctgatacattaagttatttgagctgataaagcgaaaagcttctgccagaattaataaaacggtcaagccgatcaccaatgcttgccgttgctcagtcaggaatcgttgtactttgaccatatcggcacctccttttactgtccttagtataagaaaagaagccagtaagttacttgaccgccatcaagtttggtaatttaaaaagcctcataattggattaaccaaatataaggcttgatacgtgtttctacttatttaatttgctaatgatttcattaattaaatatttgatttagtttgaatcagtccagcaagatatttaccatcatcaatactcattgtggatcgatgattcagccaaaagagaagtaacttgataatactgtccacatacagtgtttgaaaaaacttatagagagggaccttttgaatttctgctctagtcgtgttgaataagtacggagctcgttcaagaaattcatcgtttgccaagttaataatcgcatggtatagattaatatcgccattgtccgataataagacagccaatatatctttacgatcatcacaatatttaagggtcacattaaaagcagagttagctaattccataattttttgttctgatgcattatgagtatcttctagtgatgtccggtctttttgcagcgcatttttcaagctaatgaggatattcgtctctacccagtggataaaatccttcttatttttaaaataattataaaaggtcttcttactaacttcgacttgattaataatatcgatagttcgacattcacttaacttttgtgttgataaaaccttaattaatccattgaggattcggtttttagtattgattgtccgaacgtccatttatccttgccactcctattccatatgactaagcgttttcattatagacggtcggcaatattattacattaaatctcggttttcttacacgctcagtttacatttttactcatttattctgtaatagcgtccctaactttattaaacataagccaataacagccccgatgaaaagaactaattttaatattcaagtactggggttcttacttcatagcaggcagtcaaaattcattaaaccagcgtcgcacccagtgaattcttaaaatggtcaagcgcccactcctgaccatgcttggtaaaggtggcgacccccttaaccggaatcgtaatctggtagttcaaattataggcggcaattgcggtgtgcaggacacagatatcggtgcaaacacctgtaatccacaagttatcaatttttcgttctcgcaggtagttatcaagattagtattttgaaatgatgaatagcggttcttattaaactggtaaacccggtcactggcctgatgttgttcaaaccagtcattaaccttgccgtatagctgttgaccaggcgtaccgaccacgttatgtggcgggaagagtttagcttctggactaaaccggtccctacaatgggcatcagtcgggaaaattacgtagtcgccattttggtaaaaacggttggccagctgaaccaaataatcttctaattcctgcgctggcttgccacaagtaagcgcaccattgtcagcgacaaaatcgtttgtataatcaataattaataatgctttagtcattgctaactccttatttttgtgcctcatcaaccagcttttgttgcatgtcagctaaccgcttggttaaataaactgggaagcggtccggattaagcaaccgcttagtagccgccggcagctgtgctaattcggtctgcgcaaaatgctggatggcaaaagtgtcggtttcaattggcgccgcttttttcagtgtcaaaacttgcttaagcagtggcttagcaatgaagtcagttagaatcactttattccgggtgacgtgaatgtcagcattgattgccgcaatttcggttccaatctgctcgtcagccagggcaattacatcggcaatagcgtgttggggattatgcttatcgtagagccggtaaatctgcttattcccagggagcgtaatcttttcgcgactattactaatcttgatctttggcacccatttgccatcattttctagtgccgacattttataaacaacgcttaatactggactggatgaactggtaattagtcgctcaccgatcccaaagttatccagtggtgccccttcatcaagcaatgacttaacaatgtgggcatcaagggcgtttgaagcagtaatcttagcgttggtaaaaccagcctcgtccatcatcttccgagccttggctgccaactgggcaatatcaccagaatcgatgcggataccaaccggttcgtggccagctgcccgcaattccttaaagactttaattgcgttcggtactccagagttaaccacatcgtaagtatcaactaacagggcagcattgtcagggtaaattttggcccaggcacgaaaggccgttaattcatcaggaaagctttcaatccaggcgtgggccatcgtccccgccgccggaaggttaaacagcttggcagctagcacattggaggtactactgcacccaccaataatggcagcccgcgcaccatatattgcggcatcaggcccctgcgcccgtcgtgcaccaaattccattactgggcgtccgccagtaacgctggtaatctgccatgccttcgttgcaatcaatgattggtggttaatgatgtttaagatcagggtttcgagaagttggacatcaattagtgggccactaatactaaggattggttcctgtgggaagactggcgtgccttctgggattgccttaattgagcagcggttgtgagctgctgtcaggtaaaagagaaagtcgtcactaaagtggttaagggaccgcagataagcaatgtcaccagttgaaaagtgccagttcttaacttcatcaattacttgcatcaatccagcactaatcacaaaactgccatcatcgggcgccttacggtaaaagacatcgaagcgcgcctgcttatcgtggggaagcgtttgataataaccgttggccattgaaaactcatacatgtcggttaataattcatgtttcattattaaataactcctaacaagtttaggtaaaaaatactttaactactgcaaaaaataaaagtatattgaacttttattatcactaattgtagcacttttatttttagacgcaaggtagtaccagtttaaataactttggtggccggcctgaccgctttgttgcggcggtaccaacttccttaaacagcttttggtgggtctttttaaaattagaattatcaatttgatcgaccgttgtttggcggaaagtagcataaacttcgcgggcttgccgaagggtaaaagtcggtcctaagatctgtaaaatggttggctggtagtccagtttatttttaattcgtacaatggccgtattaataatttggtggtggtcaaatgcaagcgccggtcctgcagccaaactcaaaactaagtcaccattttgcaagataaacttcccgtggtcaaagttaagactaaaccacccgacttcggttgctccgtacccggccctcagttgcggcattgtcggtaagaaagtcatgtaggcaatcgccaaggcccgcccacggcttacccggtcgggatcggtgaaggttgccaactgttcggtagcactgtttgatagacgaacaccaattttatccttaatcaggcggatacaggcagcgtcagcactttcatcccgccacaatagggtttctggtaaagcccagtggccctcaaatggcggataagcccgtttgaccagcaggacttgtggtaaatgggtcaagggattaaaactccaaataatatttgcaatcgtaattagcggatgcgcaacaactttgtcagccatctctttcacctcacaaaatattatagcgcaatcaagaatcacaataataaaaaatcgacaactaaggacggccttagttattgatttaacctaaattaacttctttaattcagcaattgctttttcgtagtctggttcatcagttaattcagttacaatttgccggtaaacaaccttcccatccggatcaagaatccagactgaccgcgcaaggattccttcatctggtattaacagctttgattcgtaaccaaaggattcttccttgtcagaaaccaattccatgtttttgacaccttcagcagcacaccacttctgttgatcttcagtcgtgttagttgaaatggtcaggaaattaacctctgggaattggtccattgttgagttaaaccgctgtgtttgaatgctacaaaccggggtgttaatatctggaacaacgcttaagagagttattttgccaagcaattgccgggtcttaaccttgtcaccattcttatcaaaaaccttgaagtgtgggaattcgtcaccaacagctggtggattgcctactaattgccgcttttcaccattaattgtgatttccattcttagcaactccttttctaattttggttaggtacagtatatcaaaaacgcaattaaaaagcattgattatactcattgttttagaaaatttatgagctgtgtagctaggcaaggtatcttttaacctcgcggtttgtaaaattaagttagaaaaataaaaagccatttgtggtagacttttgaatacccatacatcaaaagaaaggacaccacaaatgacctaccatcatcttaccatagacgaactaacgatgatcgctaattttcgtgaccaaggagtaaaagcctaccgggccgccaaacttttgcaccggagcttagaaaccgtctaccgagtttatcgctttctggccgccggccacacgctccaagaatattaccaacactatcgtgaaaacaaggctcattgcggtcggaaggctattcaattgcccactgatgaggtaacttatatcaaagccaaagtggctcaaggctggacgccagacacaattatgggacgcgctgaacggccactcagctgtagtatgcggacactttaccgccttttcgaacggggcaattttgatgtgcggaccttgccgatgaaaggcaagcgtcgccccaatggttacgtagaacggcgggggaaggccggtcaacttggccaaagcattcaccaacgggctatcgactttcccaactttaaccgtgaattcggccaccttgaagccgacaccgtccagggcaaaggacatcagggcgccgttatgactttggtagaacggacttccaaagtcgaagtgattcttaacgtccatagtaagacggccaccagtgtgatccagcacttacaggaatggttggcaaagtttccaccccacttcttcaagtcgattaccttcgacaatgggaaggagttcgctgactggcgagcaattgccaaccaatttgacctccagacctactttgccgaggtgggggcacctaaccaacgggggttaaacgagaacaacaacggccttctgcggcgcgatgggctccacaaaggccgcgatctccgccacctagctgatgaagaggttgctcaaataatgagttaccggaacaacattcctcgcaagtcattgggctatcaaacaccttacgaggtattcatgaagtatgtcactgatgagcaactactttttttctaacttaaattgacatttcgggcctaaaataggcagcgttaccttctaaaaggacttaatgtgttaactaactgcctttatatttcaatacatcatactaaggtaaattctcctaaattttataaattatgcaactgcaaacacatagaaacaatgcctataaatattgatataccagtcatttgaagtataacagaaaaattagacaaagttaaatagttaaactcgtaaggcatggttccggtattcaaccggtgtcatgccttttgtttttaaagagattcgttggttgttgaaacgatatacatagtttaaggaaagctttttgaactctccaaaatctttacatggcgtaaatccattaaacagttccgttttgtataggtgaaagaaactctcaatgggcgcattgtcatggcaattgcccttacgggacatgctttgaacaaaatgaagattagctagtgttttggcatagtaaacctgctgatattgccatccttgatctgaatgaataataggatgggcattatcaggtaatttttgcagtaattcatcaatagtacttttgaccagttgtagattgggatgataacttacttgaaaagccagtacttccttactagcttcatcaaccatagctgaaacataagcccactgttgattagctagtcatatctgagtgatatcgatgtggatgacttggtatggtttcgttgctgtaaaggattgttggagaacattctgtgcaatttttctaacagtaccgcgatatgatgaatatttaccattacggtgttggttatacatacttacttggacgcctagctgacgcatgatgcgggtagctgtggcgtcggctaagtgaatcccgtcttgatcaagtaaagctttcacgcgacgataaccgtaggttcgtcgtccgcgataaagcccctgcttgctaatcgccaacactcgttgtttaacttgagcgtatttatcgtaagggttagcgatgcgcttccgctcatcgtaataagttactctcgataatgagattctttggaggagcttaccaaccgagtgacgctgtttcttaggaagcttagcttgatgagccctgatctgatccactatttgtgttttttgtcgagctttgagggtccgaacagggccaacgatttttttagaatatcccgatccattttgacgtcatacaattcttgtttggtttgcgccaattcttccttaagtcgttcaatctcatttttattgacttgtttctttagcgctttccggtttttctttttcactttaggtggcctacctttaggatgaggctttaatgcctggtaaccgccttgatgaaaatctcgtttccaatgactaatttgattaggcaagagatcatatttggctgctaccatcgccattgattcctcatgagtttgatagtagtttatcacgctcaatttgaaatcagcactaaaggttcgcttcacgcgacgatgttgaaggctggtgattccttgaagtctggcttgttcaatccaatactgaatataatggtgactaagatgatattttttagctaactggtatgaaattaagccatctgttgcccattcacgaacaagctttaccttgaattcagaactatatttagtcacgcggtttttcaagttccataatttttcctcaaaatcatcataaattctatttcgagtatactactgtccagataatttataatttttgaatctaatatttaatatttaatgagtagtattatactaatcaactcaatcgtttcacctaaaatccaccatttcttcatctgtcataattccgctcatatcaactgttccaactcttttcactaccctaatcaacacgacctgccaaaatggacattcgtacacaccactatcgaaataggacattgaacactcgacctgccagctccaaatagaaaagtgtactaatcccaatcttcaaaatcagaatttgtacactttcaatcagctatagatgccgtcatgccggcgtttatcggctatttttctgtacgttccaggacagtaacagattcaacatgcgtcgtctgtgggaactggtctactggctggattggctttgttacatggtagccttggtcagcaaaacgcttgatatcgcgaactaaggtagcaggattacaggaaacataaatcactttctttggtgccatcttaccagtagcttcgatcagactttcagcaagccccttccgtggtggatcaacgataataacatctggtttgagcccttctgcttgccacttagcaaattgatcttccgccttaccaacaacaaatttggcattcttaataccattccgtttagcattatgtttggcgtcttcaatggcggcgggaacaatttctactccataaacttgcttagcgtgcttagctactgccagggagatcgtgccaattccacaataggcatcgatgaccgtttgattgccgtccaagccagcattatcaatggccgtttggtaaaggcgttcagtctgttgcggattaacctggtagaaggacagtggtgagattgcaaaatcaatcccaaggagctgatcatgaatttcatcagcaccccataacgttttattcttatcaccaagcaagcggttcgttcgcttatcattgatgttttgcacaatactttttacttctggcactctggcaacgatcccgtcgacgatttgcttttccattggtaaccgcttcgtattcgtgactaagactaccatcatttcatggctgtaatatcctcgccgaaccattactgtgcgaatcacgcccttaccagtttgttcatcatatggcgtaatgtggtattgccgtaataagtcacgaacaaccgcaatggctttatcaatttctggatcctggatatagaaatcttcaattgatactaaattgtggctcccccgcttataaaaaccggtttctaattgaccgtggaccattttgactggtacttgggccttgttgcggtaatgataaggcttttccatccccatcgttggcaaaacttcaatctcatctaagtgtgctttggccaataattcttgaatttggtgttgcttgaatttcaactgggcatcatatttcaaatgaccaagcggcgcgattcccgtttgaatgtattttttatccttaacatcaacgcggtctggactcttcgtctgccagtccattacccgtccccaagcaaagtggctggttaccttggtgatctttaccgtaatctcttcaccaggaagggcattaggaacaaagacgggaaaatcatcaatcttaacgaccccattgccctcgtaagataaatccactaccttcgctggatattcttcatttttatgtactggaatgtttaatttcaaagttattcctccattaatttcaacgttacaaacttctcctattataacaaaacaaacggccaacttcctctttgcgaagctgaccgtttatttattctatttctttttgcgatctttataatcgtcaatgccattcataaagtcttcttcgacccgcttaaaatcagctgaggttgtaatcgcatcttctggaatctcatccaagttagcaattacttctaggtgctgcttaaggttatgaaatttcattggcgcgtcgccaccatattccccgtccaggttaaccatcaagcggtcatccttgtttagcggaataacttcaatatcggttgctttagcataaataatacgcggatcatcaaggtgctttccttgaagcgccttcgccattaagctgagcatatcgatcacactgctcttcttaacgataatcatcgtaaactttccatcatcaagtgatgcatccggcacaatctgttcaaaaccgccgaccgaattagtcaaggcaatcataaacatggaagcaccgccccggtattcctgattatcatacttgattagcatgtcgactggcttaatccgcggcattaactctgctcccttggcgaagtatgctgcgtaaccaaagagggacttcatttgcgaagggacctcataggttaattcagtcatcgttccaccagcagcaatattcatgaagtagttttcaccagcccgaccaatatcaatcttaaatttcttattcttctttaagattaacttagccgcggcgatcggatcatcacgaggaatccgtaatgcccgtgcatagtcattagtcgtccctgctggaataatcgctaatgttggccgatgttctaacccagcaattccattaaccacttcattcagagtaccatctccaccagcagctacaatcaaatcaaaaccgtcttcagcagcacgagtggcttcgttcttagccgagttaggcgcaggagtagtcgcaaaagcactagtttcatatccagctttctcataaattgcgagaatatcaactaaatcacttcgcaatgtttcacggcctgaggtaggattataaattatccgagcacgttttcgcacggtcatccctccctactctatttagccttcaaagacttcatcaataattgagtaacaacttgtgggttagccttaccacgcgtttgcttcatgatttgacccattaagtagccgacagcccggtctttaccattcttaaagtcttcaattgattgttcgttgttatcaagaacttcatcaacgattggctgtagttgcgcaggatcagataactgaacaagaccgtgttcctttgcgtaagcatttggttcttcaccatctaagattcccttgaagaccttcttagccatcttagaagaaattgttccgtcttcaatcaacttcaccataccggcaaggttagctggagtaagcttggtatcttgtaagtcaacttgcttatcgttcaagtatgagtttacatcgttcattaagtagttggctacccgcttaggatcgccaccgttcttaacagcttcttcaaagaaatcagacatttccttagtctgggtaagaaccatcgcatcgtaatcagttaagccaagatccttaacatagtgctcacgacgctcaccaggcatttctggcatttcgctttcaatttcgctaatccattcatcgctaacgtttactggtggcaagtctggttctgggaagtaacggtaatcatcagaaccttcctttgtccgcatcagaatagtctcaccagtcgcttcatcataacgacgtgtttcctgaccaatgtgtccaccagccatcaatactttttgatgccgtttttcttcaaatgcgagggccttccgaacatagttaaaggagttgatgttcttcatctctgtcttggtcccaaacttatcagaaccgattggccgaattgagatgttggtatcaacccgcatggacccttcttccatcttcacgtcagagatccccgtaaattgaatccgttgacgcaatgcttccaagtaagccactgcttcttcaggcgaggcaatatctggcttagaaacaatttcaattagcggtgttccttgccggttcaagtcaacgtatgaatacttgctggtgtgagtgttcttaccagcatcttcttcaatgtgcatttctttgataccgatctttttctttttaccatttatttcaatttcaatccaaccgtcatgagcaattggagtatctgattgagtaatctggtaggctttcgggttatcaggatagaagtagttcttccgatcaaagtgcatgtgatgggcaatttgagcatgaagagcaagtccagccatgattccgtcacgaacgacacccttgtttaagcttggcaatacaccagggtacccccagtcaatgacattggtgtttgcgttaggctggtcaccgtattcaacgggggatggactgtaaatctttgaattagtctttaattcaacgtggacttctagaccgattgttgtttgaaagttcatcttagttttgacctcctaactttggtgtcttcttgtggaaatcagttgtctgttcaaagacatatccagtgttataaactgtttgttcgtcaaatgcttttccgatgatttgcagaccaactggcatgccatttttagcagagaaaccagcaggaatagacattgcaggaaggccggccatattaacgggaacagttaatacatcgttcatgtacatggtttgtggatcatcaatttctgcaccaatcttaaatgccgttgaagcaccagtagcaccaacgattacatcatgatccttaaatacgtcttcaaaatcttgggcgataagacggcgaactttagcggccttattaaagtaagcatcatagaaaccagcagagagagagaaggtccctaacataatccgtcgcttaacttcttcaccaaaaccttccgaacgagaacgaacataaacgtcttccaggttcttaacatcagcagctcggaagccataacgaataccatcgtaacgttggaggttagaagatgcttcagatgaggctaaaatgtagtaagcaggaaccccatacttggtatgtggcaaacttacttcatcaacaattgcgccgagggattctaagtggtccaaagcagccttaattacttcttgaacatcttcgtctaagccatcaaagtattcctttggcacagcaatccgtaagcctttaacattcgtattttcgtttaattgggctgcccagtctggaacttctttaagtgaggatgtcatatcccgttcatcatttccactgatgagggcggtcaacaaggcattatccttaacattttgagtcaaccagccgacttggtcaaaacttgaaccaaaagcaatgatcccccaccgtgatacacgaccgtatgtaggcttcatcccaacgacaccgttaaaggaagcaggcatccgaatagaaccaccagtatcagtaccaagtgcacctaaaacatccccggccgcaacagcagcagcagaaccaccggaagaaccaccaggaacccgggtaagatcccatgggttatgagtcgtaaagaatgctgaattttcagtagatgaccccatagcaaattcatcaaggttagtcttaccaacgttgatgtaatcagcggcatttaacttttcaaccactgtcgcgtcatatacagggttaaagttttcaagcatcttagaagcagccgtcgttgtgaggcctttagttaagatattatccttaactgcaagcggaacccctgcagttaattgatcagcactaatgccctttgcatcaatctcagctgcccgcttcagtgcttgatcttcatttaagctgatgaaagctttaacttgatcttcattacccttaatgtggtcaaaagtttcctttgttaattcagttgcactgattttcttatttaccaagtcatcgtgcaattgactcaagcttgtttggtaaaaatccattattcgccgtcctcactttcgtcaagaattgctggaaccttgatgtagccaccatcagtttcaggagcattgttaagcaaggcttcttgttcgtctttagaactcttaattgccttatcttcacgcattacatttacccgatcggttgctgatgtcattggttcaacgccatcggtatcaaccgcttcgaggtcttcaaacatatcaataatgtttcctagttgagtggtaaacttaccaagttcatccttagggaactcaagcttagcaagttcagcaacgtgttctacttgttgctcagtgattttactggccattctctctacctcttttccagtaatttaaaatctacatatacatttaacaattttagcacagaataggttcctatttcatccatgtagaaataaaaaaaggagttatcggttcgcattttctagtaacgaatcgatattctccttttttcatctttaataagaatcaaaaatatgcgactggaagttatcagaaccagcattccggtaaacaaccgcttgaatttcggaatcagattgaatcttaatatcaatcggaatcccattaggtaggtacttctttgctgcccgggtaatatattgggtaaaactagtaatttcactttgactatagaactgagtagtaacagtaatgtgcatccccgataaagtcccattttcatattgagcttgtgctgtaactccactcaagttagggaagaaactttgaatctggctcttaaagtttgagaaactatcatcatcagtttgatcagaactattagttgttgatgcactagcctttggaaggactacattcttgtaatttaacttccgccagctactaattgtattaccactattcttactataagcaaagaatgtaccaccaactaaactatcatccggtgcttgtttgtatagtgcaatcacgattggaacatttccaacgcctgattttttccgtactcgttgaagaaccttttgtgccgcgatttcaccttgacgacgaacctcactatcactaatcttcttagttaaagttggtcctcctgtcttagtttggtagttgtattcggaatttattccaatcccaatcgtaatcccccgcaatttcatggaattaccactttcttgcatataatcttgctcttcaatttgttgaatatagactgggttaggattgctcttctttccttgagcagggtttagcccttcaggattactctttgtttttcgaccaagccagttttcaatcgtcccactactaaggtattgaccttcttggaaaatatagctttttgttgaaaagactcgttttgaaacctgggtcaaaccactttcaaagcttttaaggttatattggttatcattttgtgagacatttataccccgagctttacttgttcggtaacgaccatttttaatcacaccttgataagtaccattacttgaaccagtcgttgaatagtttttcgatgacgactttcctccaaaaccacatgatgcaagcaagacagtacacatcaaaacggcagcactaacggctattttttttgcctttcgcttcacgatttactgttcctccttcattgcttggctgaattgctgttcattccatacgtcaatacccaagtcttgagcttttgttagcttactaccagcatcagccccagcaatgacaatatctgttttctttgagacgcttccggttaccttagccccgtggttttcaagccatgattttgcttccccacgagtcatttcagttagcttaccagtcagtactactcgccgaccattccattcactatcaggattagcatttgaccgtgagccaagataagcaaagtttaccccaacttctcgtaattcgtcaattaatttaataacctgttgattagcaaaataagttacgatactttcgccaattgttggaccaattccactaatcgcagaaatttcatcggcatcggccttcattaagctatcaaggtcaccgaaatgttccatgataattcgagcagcctttgcacctacatgacgaattccaagaccaaataataagcgctcgacagaattattacgactattatcgatcgatgtcaataggttagaggtcgatttctcgccaaatttatctaaagttaataattggtcatgattaagtcgatataaaccggcaacatcatgaatcaattctttatcccatagctgttcaatgattctaggaccaagtccatcaatattcatggcattccgggaagcgaaatgtgctaagccttctttaatttgcgctggacacattggattaatacagcgtaacgcaacttcaccatcaagatgaactaattctgagccacagaccggacacttcgttggaatctcatattcaactgaatctgcagaacgtttagttggatctacttttgaaatttcaggaataatgtcacccgctttatgcaggtaaacagtatcaccaatccgaatatctttttcacgcaagtaatcaggattatgcaaagaagctcgactaactgttgtacccgccaattgaactgggtccataactgctgttggcgttacattgccggtccgaccgacagtccagacaatatcacggacaatcgttgcttgctcttcgggagggaatttataagcaatttcccagcgtggcaccttaactgtattcccaagggcaacttccgtatcaaggtcgtttactttttcaacaattccatcgatcccgtaagtgagcttgtctcgttgagctgtatattcttcaatatacttctcaatctcttcacggttatgaacaactcgattattaggattaacattaaaccctaattctcgcatacgatcaagtgcttccgcttgggtcttcacccccaacttttgatattcaggaacataatatataaatgtatctagttcacgttgcgccgttactttcggatctaattgccgcaaacttccggctgctgcattccggggattagcaaaaaccggcaatccttctgcttcgcgtttagcatttaactttgcaaaagccgctttgggcatataacattcgccccgaacctcgatcgataatggttctggcaattctgcgggaactgacttgatagttcggacattagcagtaacatcttcaccaatcgttccattgccacgcgtagaaccttgaactaactttccattctcgtaaacaagtgaaagagaaagaccatcgatttttagttcgagattatattcgggttcaacttcaacatcccgattttcctgttgtcgttggttaaagtccatcaattcttcaatcgaaaagacatcccccatcgataacatcggaatttcgtgccgaacttttgttaattggctttctgttgctcctcctactcgttgggttggcgaatcggcagagagcaattgtggaaattgttcttccagctgtactaatcgctgataagcacgatcatatacatgatcctctacagttggattgtcttgttcataatattcttttccccacttaatcaattttgctcgtaatggcttaatctcatcttgagcttcttgaagggttaattcttttactggcgtctgtttttcactcatctcatccgcctcatttcattattttcgtactttcgtaattggggcaaaacttgccaataaccgctttacaccctgacttggaaaggcaatatctaattccatatcattaccactaccgttaactttgaccactgttccttggccccactttttgtgttcaaccttatcgccagttttccagccaaccttatcggccccagttccggtgttagtaattggtttaacccgcttgccagcactgcgatatgttcgcttttgctgatcacggtaggtagtagcggttgcggcagcacgatcaaatggcagtttactatctttaatgctattacctgatgggctattttcaaactgtaacaactcagaatcaatttcttctacaaatcgtgatggttggttacgttggatacgaccataaagcaagcgtgaaaaggcattagtaagataaagctttttctttgcccgtgtaattccaacataggctaagcgacgttcttcttccaattcatcatcttccattaaagctcgcgataatgggaaaataccttcttccattcccacaaggaaaacaactggaaattcaagtcccttagctgcatgtaatgtcattaaagttacagctggtgcttgttcatcaacatcatcttgatctgagacaagggccaaatcagctaaaaagttaataattttttgcaagttaggatcatcatcgtctttatgctgctcatcatattcttgtgtaaccgacttaaattcatcaaggttttcacgacgagcttgtgcttcaaggcttcgatcatcacttagcattttgttgtagccacttaactctaaaatctgttcagttaaatcagttaatgtgagatattctgcttgtttagtcaagttagccattaattgaccaaattcatcaattttatttcgtgttcgtgcagtaatttcactagcagtatcaacattttgagctgcctttaataatgtccagccattttcattagcgaaattgcgaagatgttccacactagttaaaccaattcctcgtttgggcgtattaacaacgcgttcaaagctcattgaatcggcaggattaacgattaaggtcaaatatgctaaaatatcacgaatttcacgccggtcatagaatttatggccaccaaccatcgtatagggaatactactcttcaagaaagtttcttcaaccatccgtgattgtgcattagtccgataaagaattgcaaagtcattaaagtgatagccatgcttttcttgttcttctttaatcttcgaaacaataaactgcgcttcatcatgttcattttgcgcgcggtaatacgaaattttgtccccttgaccattttctgtccacagattcttcttttttcgataaaggttattagcaataacttcatttgccgcatttaaaattgtttgcgttgatcgatagttttgctcaagcattaccgtcttagcttggggataatcatgttcaaaattcaaaatattgttcatattagctccacgccaaccataaatactctgatctgcatcccctaccacacacaaattttggtacttttgcgctaatagattaactaaccggtattgggcatcattcgtatcctggtattcgtcaacatggatgtagtggaacttatcttgataaaattcaagcgtctcttgatcactttccaataactcaatggtcttcataatcagatcatcaaaatctaatgcttgattagtttctagctcttgttggtaaagcttatatgctcgcgcgaccatgttttcaaacatactattagcttctttgctatagtcatctggcgtcaacaaagcatttttagcattagaaatcgcacttaaaatactgcggggatcaaattttttagtatcaatatttaattctgcacaaatccgcttcattaacgtccgttgctcacttgtatcagcaatcgtaaaggcgcgattatagccaattttttcaatatcacgacggaggattcgaacacataatgcgtgaaaagtcgatacccaaatctcattagcactttcaccaagtaatttaccgacccgctctttcatttcgcgcgcagccttgttggtaaaagtaatcgctaaaatattccatggtaatacaccattttcttcaattaagtaagcaacccggtgtgtaagaacccgtgtctttcctgatccagcaccggccattactaataatggtccctctgtagttaatactgcttcggattgcttatcattcattccttctaataatgcttgcccgttattcacgctgttccatcctctctaaattttcatcggctaatattataccaaattaggatctcatttggtgctaaaatcgaacgtatgttaggaaaaataaagagactgcgatttcatccccagtccctcgtaatcttgtacgcttaatttataatttcgtgatcaagcttgttcgttccaaacttcagtatcgtcaacctgattctttaaggctgccaagttatcgccgccagttacccagacaaagcctagaattgcctgatcgtcatccccaacatcattaaagaacctaaattgccagttattctttagcaaccattgccgttgaattgctcgtgattgataattgcgaacgaccatcaataagccaatttgtaatggtgtaataacatgtaggggcattccaacagtgcttcttaattgttcttcatactggtcaacatttgctgtgacatcataaatattagcaatcgacgttaaccctggttcaatattctttacataaagagtaccagtagaagtaacataaaagttaaccgaaaataccccccgatattcaagagatgccgcaacactttttacaatccgttgcatctcttttaacatatcatcgtgaatatttgctggtgtcgcaacagaaatcaattggcgcttgtcattgtaatgaagctgagcaagtgggaaaatctctgtatcttttccatcagttgccgctgtcatagtatattcatttgtatgttcaatccacgattctagtaaatatgtacccgtatcaataaaatcagcggcgcgagtaatatcagattggcgctcaatcagcattgaattttccccaattcctcgttgaatgggttttaacaacgcaggatagccaatggaatcgattgattggtaaacatcatctaaactaaccaccgtcatatatggagcaatattaatatttacctgatctaagaaagcacgttccattaatcggtcttgaacaatctcaagagcattaatcccctgaggaatcactgcatattgactcaaaaagtgcatgacgcgagaatcgacattaggggtttgataaataattgcatcacatgcttcaccaaactgagttagttttgtccgatcgttcattgcccctacaatggtaaagtcagccattttagttactaatggctgagaacgatccacatacacaccaacgttaaagcctgccttcttcgctgttgcaataagtgctgccccattgcgattaattccaataattcctaaagtactacctgggtaaatagcatctctgcccattttatcacttcccttattagtcttttacgaattcaactttattatcactcaatgattgaattcgtgccaatgattcgacacgaattccacgttcttttagttcaccagctccaggttgaaaactcttttcaataactattcctgcacccgctacttgaacccctgcttgatcggcaatttctaataatccctctactgcttgaccattagccaagaaatcatcaatcattaaaatcttatcattagcatctacatactttttagaaattgaaatccgattggttgttttcttagtatacgaatatacatcagcagtatacatattttggttaagagtaagactcttatgcttacgagcgaaaataactgggagattcatttccaacccagtcattacagctggagcaattccggatgattcgactgtccaaatcttagtaatgccttcattagcgaaaagcttggcaaattcttgaccgatatgcaacattaattgaggatcaacttgatggtttaaaaaagcatctacttttaaaacattacccggtaaaacagtcccgtattccttaatcttttcttctaactctttcatttttgtccccctctacattactcattacttatcataattatataatttatacgccttaatcaccgaaattaatttttgtgcataatcaggatcagtcgcataacctgcttcttgcaatccccgagctgcttcttgataattagtcgcatggacaactcgatcataattttgctgattggtgtctgttccatttaacatcaagcgcgtatggtctttaatagaatcactccaactatcataaacgcggaatcgtcccttagtaacgatccacttaccattaatatattctttagttgtcattactcgtgaatttgctcccgttcccttaattccaaataaattatgatattgtgacgctaactgactcgttccccattgagattcaagaatcgcttgggcaatcgtaattgatgcatagatatgataggtattttgcattgcctgggcttcaggagcaacttgctgaataaataattgcttcgctcggcgatccttttcacgtgcctcttgttcaattcgttgctgattccagattcggtaaaaatggtgcccaacgtaaacacccaaaaagataacaataacagcaagaatgctaataatccaatttctacccgtatggcggtttttgtttctccgcttccgttttgccacaagcttagcctcctcttttctactagttattaattgtagcaaaatccatctcgtttgggttaatttatcgtaatatttttagaagaagttaaaaaagcacaactgaaaaattttttccagttgcgcttgctgctactagccttaagtattaatggaattgcattccaccatcaacaataattgtttgtccagtaacgtaatttgaatcaggaccagctaagaaacttaccacattagcaacatcctctggttcagaaagacgcttcattgcaatgttcttggcaaaggtttccattccccattcatcacttttaccagcattttgaccaacttgatgtgcaatatcatacatcatcggtgtcttaacgattcctggtgcaaaagcatttaccgtaatatcttcagttgccaaatcttgagctacgacctgcgtaatgcctcgaatagcaaattttgttccagaataaagtgcaagattaggattaccaacaacaccagcttgagatgtagcattgataattttaccaccatggccaagctccttaaatgccttgtgggcagcttgaattccccataaaaccccagcaacatttacaccatatactttttcaaattgttcaggtgtaattgaatcaattggggtagtaggacctaatccagcattattaacgattacattaagatctccaaaatgttcgactgtcttctcaacagctgcaaacacttcttctctatttgctacatcggctacaagtggtaatgcttccccaccattattagtcagttcatcaacaacttgttggagctttacctcgtttaatgctacaagagcaactgcaaagccatccttaaccaatctttctacaattgccttaccaattccttggcttgctccagttactaatgctacctttttagtcattagtaatccctcctttatattagttatcatttattataccgtatattaaattccgtttaaatataaaaaagacaccagcaaaatactgatgtctctggaagcgataatcgaaatattaacgcttactgaattgagcagccttacgagctttcttaagacctggcttacgacgttccttcatacgagggtcacgagttaagagaccagccttctttaaagcgtcacggaagtctggatcaacagcgagaagtgcacgggcgataccgtgacgtactgcacctgcttgaccagagaatccaccaccattaacgttagctaaaacgtcgtattgaccttctgttttagtaacagcaaatggttggttaacgatagcacgtaagttggcaaatggaatgtagtcttcaattgccttgccgttcatcgtaatcttacctgaacctggtactaagcgaacacgtgcggttgcatccttacgccgaccagtaccactgtattgtacttgttgagccaattccattccctccttagattaagttagtaatgtctaaaacttctgggttttgtgcagcatgtttgtggtcttcaccagcataaacatgtaacttcaaaccttgcttgtgaccaagagagttgtgtggaagcatacccttgatagcagtttccaataacttctctggttcctttgcaaggaagtcaccagcagtccgttgcttcaaaccaccagggtagtttgaatgacggtagtacatcttttgagatgctttcttaccagttaacttaacttgcgcagcgttgataacgataacgtaatcaccagtatcaacgtgtggagtaaatgttggtttgttcttaccgcgcaaaattgatgctactgcagatgctaaacgacccattgggacattcttagcatcgacaacgtaccatttgcgttcaacttcaccaggttttgcgatgtatgtcgttctcacgattaagtcctccaattttgtttttcttttacatataatagtgtaccgagttattagatggaaaagaaataccaatggctagtataccttcttctagtactttcgtcaatccttttcatcatttgttccataatctacattaactaaatataaaccacttgctggagccgtcatccgtgccaatgtccgatcctttgcctcaaggactctagacacgtcatctactggccgctgattgctcccgatttctaaaagaaaagccaccattattcggacttggttatagagaaaaccattaccagtaaaatcaaagacgacttcatttcttaattcatctcgtttaatcgtgatactctcaatcgtccgaacattgctttttgcttgactccccgacgcaacaaaacttgtaaagtcatgagttccaactaaatcattagctgcttttctcatcttttctaagttaagaggatatttaaaatgagaagtatagttgcgtttaaatgggttcacaaattccccctgatcaacccggtaacgataagtcttacgatgagcactgtatcgcgcatggaaatcattatccactaattcggccttcttaattaaaatatccagtggcaaaatactattgagggcttttctcatagattcattacttaaatgatagggaatatcaaagtgcgcaacctgattaagagcatgcacccctgcgtctgttcttcctgagccgataacaggaatagcaggatttgggtgcttagcaattttatttactgcattctttaatgtttgttctactgtccgcttatttggttgaatttgaaaaccggaaaaattggttccatcataagcaaaggttattttataacgatacattgtttacttccttattaatttagaaaaatattcgaatacaaactagaccaactgtcacaatcaatagcgccaagccagcccaagcatcatttttatgccaaactaattgacgataatgagtccgtggtgcattaggatcataccctcgtgcttccattgccgttgctaattcttcagcacgcttaaacgagttgacaaacaatgggataagaatcggaactaaatgtttaatccgtgtcaaaagatttccagcgttaaaattaatcccgcgggcccgctgagctttcataattttattagtttcatccataatagttggaacaaagcgtaatgcaatggaaagcattaacgtaatctggttgacaggaactttaatcacttgtaatggtttcattaaccatgccaaggcatctgcaatttgaaaagtttgcgtagtggcagttaagacagttgaggcagtaataatcaaaataaaccgataaaaaataattaatgaattaataaggccgtcacgggttattgccataattccccaatgccaatacgtctttccgccactactaaataaaatttgaaacgctactgttatcaaaataattaaaaataacggcttaatcccttgccaatattgtcttaaaccaacattacttaacttaattgccgcaaggagcgctaataaaagccatatagcagctaaaaaattattcacgaagaaaattaaaataacgtaaataatacacatgattagttttattcgtggatcaagacgatggaggatcgattttactggtacataactaccaaatacgattttactattcattttctttttctcctcatcgcttctgctatttcatctgctaacacatcaagcgtaagcggttctgtattttttaaggttatcccatctttactaaggaattgcgcaacctcgacggaaacaggcaaagtcaatgatagtttttttaatcgttgagcatccctaaataattgctgaggagtagtatccgcaacaatctgcccattgctcattgcaattacgtggttagcataataggccacctgctccatttggtgagtaaccattataatcgttgttcccttctcgttaagatctttaataagtttaagtaaatcattagttgcttgagtatccagtcctgctgttggttcatcaagaattaaaatttggggatccattgctaaaacgccagcaatcgctactcgcctcatttgtcctccagaaagtgcgaaaggggagtgtgactttaattctaagggcaaatccaccatttttaatgcttcatcaactgctttttcaattttttttgcaggccaccctaaattatgaggcccaaaagcaatatcctccgcaactgtttctgcaaatagttgctgttcaggaaattggaatacaaaaccgacttgatggtggattttacttaaatattcagtttttgtcgttgcattaatttctaaacctgctacattaagttccccactactgggctttattaatccatcaattaatgaaaccaatgtcgactttccacttccggtttgtccaataatagcaacaaattcttgctctttaattgttaatgagacattatgtaaggcttcattagtagaattaggatatgtatagtggagtttttttactgtaattgctgctttagccaattttttagctcctctaaatttaaatatctatttggaacattaattcctcgttcaaccaataatttctgcagttgctggcttgcgggaattcctactccaatttcaagtaataattctttatctttaaggatttccgatggagcaccttgttttacaacttgcgaatcatttaatacaactattttgtctgctaattcaatttctttaagatcatgtgtaattgaaataattgaaagattatattctttttttaatttttgtaataaagctaaaatttcttgtcgtgctaaaggatcaagcatactagtggcctcatcaaggattattatcttaggcattaatgcaaggattcctgcaagtgctacccgttgcttttgtcctcctgagagattaataggagctgtgtttttataatcactcattcctaccatctttaaggctttatcaatcttttcctccattttatttcgatctacttgtcggttttcaagtccgaatgcaacatcgtcagcaacggttgctcctacaaactgattttcagggttttgaaaaacgaatccaatatgctggtgaatcttgcctaaagaactttcgttaacttgtatttcgtcaacttcaatcgatcctgcagtaggactaagcaatccatcaattaatcgggctaatgtactctttccactaccattatgaccaataatcgctgtccaagaaactggttcaaaatccagattgatattttttaaaacggggtatttactgtctggatatgtaaatacaagttttcgaatctttattccagtcacagtatttcctcttttcaatattagttaataagtatattttagcaaagtccacagaattatctatcaaaattaaatttaaaataaaaaatcacttaccattgaagtgcacgagggtttcccgcattcaagctagactagggtttccccaccatcgtaacgctctatactatcaatgatagtgattctttattacgtatttaatttatgtgaacaaatcaattagtccactaattcaagaataaccattggtgcaccgtcaccacgacgaggcatagtcttcaagatgcgtgtgtaaccaccgttacgatctgcatactttggagcaagttcttcaaaaaggttttgaagagcagattgtacacgaatatcatcgccatcttccttaacatcagcaacaacattacgtacaaaagcggcagccttacgacgagaagctaaatcaccatgcttagcaagtgtaatcatcttatcagcggtcttacgaacttccttagcacgtgcttcagtagtggtaatacgaccattaacgattaaatctgtggttaaatcacgtaataaagccttacgttgtgaacttgtacgtcctaatttacggtaactcataaagtggttccctcctttgcaattggtatactaattagtcgtcttggcgaaatgaaacaccaagatcatttaatttaagtttaatttcttctaacgacttttgtcctaagttccgaaccttcatcatatcagacactgttctatcagttaattccttaacagtattgataccagctcgcttcaaacaattgtaagaacgtacagagagatcaagctcttcaatagtcatttcaagcatcttctctttgtgtgtttcttctttttcaaccatcacttgagcattttgagccgtttctgttaaatcaacaaacatagctaagtgttcagtcaaaatcttcgcacctagactaactgcttcagttggtgttaatgaaccatcagtccaaacatccagcgtcaacttatcataatcgttacgttgaccaacccgtgcattttcaacagtgtaatttacacgttcaattggggtatagatggaatcaatcggtaaaacaccaattgctaaatcatccatccgggccttattatcgttagcagaaaggtaaccgcgacccttatcagcagttaacttgatgtgtaattctgcgccatcagcaacagttgcaatatgcagatcaggatttaagattgtaacttcattatcaccctggatatcacttgcagttacttcagcaggtcctttaacatctaattcaagattcttttgatcctcagaatcaagcttcaaagaaactttcttaagatttaggataatctgcgtaacatcctcagttacaccttcaacagtgctaaattcatgtaaaacaccatcaatttgcatactcgtaatcgctgcacctggtaaagatgcaattaatacacgccttaacgagttaccgagagtggttccataaccgcgctcaagtggttctacgacaaacttaccgtagttatctgtttcttcaactttgtgaatatttggcttttcaaattcgatcattctatccttgtacccctttcaaaacgtggttcgtatttgagacaaaaaggcaattgatggaaataattgtctccagcaatgtcaattaaacacgacgacgctttggaggacgagaaccattgtgaggaacaggtgttacatcacgaatagcagtaacttccaatccagttgcttgaagtgcacggatagcagcttcacgacctgaacctggacccttaacttcaacttcaacagtcttcataccatgttccatagcttgcttagcagcagcttctgatgccatttgagcagcaaatggagtggacttccgacttcccttaaagcctaaaacaccagctgaagaccatgctacagcgttaccttgaacgtcagtaatcatgatcaatgtgttgttaaatgttgagtgaatgtgcgcaacaccagtttcaacattcttttttgcacgacgcttacgcgtaccttttttggttgccatatctagtactaacctccttttttataaagttaaactacttcttcttattagcgatagctacagccttacccttacgagtacgagcattgttcttagtgtgttgaccacgaacaggtaggccacgacggtgacgcataccacggtatgatccaatttcttgaagacgcttgatattcattgaaacttcacgccgtaaatcaccttcaacttgaatttgatctacttgtgcacgaatcttttcttcttgatctggagttaaatcacgaacacggatgtcttctgatacaccagcattttcaagaatcttcttagcagtagaatcaccaataccaaaaatatatgttaagccgactacgattcgcttgtcacgaggtaaatcgacacctgcaatacgagccatgagctacacctccatttctctataaaataaattacttaccttgacgttgcttatgctttgggttagcagagcaaataaccataacacgaccgttacgcttaacgatcttgcagtgctcacacatctttttaacagatggtcttactttcattctaaaatcctcctattgagagtaattgatcaataactacttgaaccggaaagtaatccgaccctttgtaaggtcatatggagacatttctactttaacacgatcccccggtaaaattttaatgtagtgcatccgaattttaccagaaacatgtgctaaaatttctgctccgttttccaattcaactttaaacattgcattaggcaaagtttcagttactttaccttctacttcaattacatcggcttttgccacgaaatagtacctccttgcctattctagatattacgtaaaaatggtggaaagtataaaacttcccactactcagatagataaaccttgcatagtttagcatatgtttacaaacttcgcaagagataactattatctagtttaggtttgttaatactttcttgatatcttcgtaaactttatcgatatcttgttcaccattaatttcgtgcaaaacacctttcttttggtaatagtctaccagtggtgtgttcaacttaatattaacatctagacgattcttaaccgtttcaggcttatcatcatcacgctgataaaattcatgatgaccacaaacgtcacatgtgccttcaactttaggaacattgtaaagcttatgatacgttgttccacagttacggcaaataaaacgtccacttaaacgttctaccaatacatccggttcgacgtgaatattgatcacagcatcaagatgccgattactctctgctaacatcttatccaaagctgctgcttggttaagattacgaggaaatccatccagcataaagccatctttagtatcatcttgagctaaccgttccttaacgataccgttagtaacttcgtccggaacaagttcacctttatcaatatatttcttagcttcaattcccatgggagtttcattttttatggctgcccgaaaaatatctccagttgagatatgaggaattggaaaatcttcaacgatcttttgagcttgagtacctttaccggcacctggaagacccattaatacaagattcatactcattagtcatttcctcctttaggttctcgaataaatccaatatattcgcgcttcattgttagtccgtttaactgccgaacaacatctaaagcaatttgtacgataatcagtaagcttgtaccacctaaaccaattgactgacttaggttccatacgttacttgcaattaacggaattaaggagatcaatcctaagaataatgaacctactgtactcaatcgcattaacaatgaagaaatatagtcttgtgtaccctttccaggacgcactccagaaatataacttccttgcttttgcaaattctcagcaagtttttctgggttaacctgaacaaaggcatagaaaaaggtaaatacaacaatcaaaaatacatacagtgcgatcccaggaccagattgcatgttaaaaatggtcgtcatgatttgataccaactatccccaccatggttttgctggaaagccataagaatagtttgcggggttgagataaaagaaccagcaaaaataacaggaataacacctgatacgttaatcttcaagggaagataactactggatggtgaagtagtggttcgtcttgtgtattgaattggtagacgtctttctgcctgttgtacccatgtcacaaacgctacaataattaaaattgcaacaataacaagagtaacaaatccaattcccatccacaaagcagaaccagattcaccagcaatttggtcatcccataactgacgaattccacctggcatttgcgcaacaataccagcaaaaattaacatggaaacaccattacccaagccacgttcagtaatcatgtctcccatccaagtagcaaacattgtacctgcagttaaaattaaaccgattgttaaatacgtttgaacaccaggatgattaaccaaacgaatagtactcaatgcattaaacccggcggtaataccgattgattggataaatccaagtacaatcgttaaccatcgggttgcttgattaagttttcgccgtcctacttctccttgtttactccattcaacaaaacgcggaacaatatccatttgtaatagttgaacaacaatttgcgcagtaatatatggagaaactcccattgcaaataaagagtaattctccaatccaccaccactaaaggtattgaggattgatgctaaaccggttgaggagatttcctgcaaagcagcagcgttaactccaggaacggtaatcgctgccccaatccgatagacaatcaatacaaacaatgtaaagaaaatctttttacggatatcttttaccttgaatgtatttttgacggctgtgaacaaactacatcacctcagttttaccaccagcagcttcaattgcagaaactgcagaagcagaaaacttattagccttaacagttaatttcttttcaagcttaccgttaccaagaatcttgatgccgctcttcaagttcttaactaagccactttccatcaataattgtggagtaacttctgtaccatcatcaaacttgtttaatgatgccaagttaacaattgcgtattctttccggttaatgttggtaaatccgcgctttggaatttgccggtaaagtggcatttgacccccttcaaatcctaaacgggtctttccatgagccttttgccctttagtaccacgtccagatgtaaaaccgtgtcctgatgaaagtccacgacccttacgaagacgcttagaacgagaaccagcagctggcttcaattcgtttaacttcattagtaggcacctccttattatttaattttaattacttaacttcttcaacagaaaccaagtgagcgatcttaaaaatttgaccgcgtgttgccgcattatctggtaagataactgagctattgatcttacctaatcccaatgccttaacagtacgacgttgagtaggttgtcggtgggcaacactgtgaattaaggtaacttttacttgagccataatttagtgccctccttattctgctaagtggtctactgaaacaccacgtaactttgcaacttcttcagcgttctttaattgcttcaaaccttcaaatgttgcacgaacaacattaacaggtgtgttagagccaaggcgtttagaagtaacgtccgcaacaccggcaaggtccataacattacgaaccgcaccaccggcagcaactccagaaccttcaacagctggctttaacatgatctttccaccgccgtatacaccaataacttcgtgtggaatagtagttccaacgataggaacagtaatcaagttcttttcagcagctgcttgagctttacgaatagcttctggaacttcttgagccttaccagtaccaaaaccaacatgacctttacggtcaccaacaattactaaagcagcgaaacgcatacgacgcccaccttttacaaccttagtaatccggttgatggctacaacttgatcgtctaaatccaactttgttggatcaatgaattctgatgatgccattgcaggttattcctcctttttttagaatttaagtccgttttcacgagcagcttcagccaaggcttgaacacgtccatggtaaaggtatccaccacgatcaaacacaacttcagtaatgttcttttcgttagcgcgtttagcaattaatgctcctacaccactagcttgttcagtcttagtctttccacttacttcactatcatttgtggaggcacttgcgagcgtcacaccctttacgtcatcaattaattgagcgtaaatgtttttgtttgaacggtaaacacttaagcgtgggcgctccgcagtaccagaaatcttaccgcgaacgcgtaaatgacgacgttgacggatcttgttcttgtctggtttagaaatcacaacagtcacctcttattatattaattatattaaataaaagaatgttaaataatcttctcagattacttaccagtcttaccttccttacggataatgtgttcgttttcgtaacgaatacccttacctttgtatggttcaggtgaacgtacagcacgaacttcagcagcaaaattaccaaggtgttccttgttaattgagcttaattcgatagtagtattgtcaggtacgttaatttcaacatcttctggcttatccatttcaactgggtttgagtaaccaacagttaaaatcaacttgttacctttgagttgagcacggtaaccaacaccaacaagcttaagaaccttcttgtaaccattaacaacaccttcaaccatgttgttaacattagcacgagtagttccgtgtaacatctttaacttattagtatcagcatcacgatcaaactttacaacgttaccatcaatagtcattttgattaatggtgaaatttcacgagataaagtacctttaggacctttaacagtaactacattaccatcttgagaaatttcaacaccacttggcaaatcaatttctttgtaaccaatacgactcatctttgcacctcctatctaatattcgttttttaccaaacgtaagcgataacttcgccaccaattttcttggcacgagcaactttatcagtaacaacaccttcagatgttgaaatgatagcaatacctaatccattaagaaccttaggcacagcatctgacttaacgtatgtacgtaaaccaggcttagaaatgcgctttaagccagaaataacacgttgaccgtcattaccgtactttaagaacacacggatgatgccttgcttgttatcatcaacgtattcaacatcgcgaatgaaaccttcgttttttaagatttcagcgatgtccttcttcatctttgatgcaggtgcttctactgattcgtgttgagccatgttagcattacgaatacgagttaagaaatctgcaattggatcactcatagacatcgatgttttcctccttttgtcggtttttttgtttaccagctagccttcttcaaaccaggaatttgtcctttgtgggcaagttctcgtaagcaaatccggcataggtggaatttacggtaaacagagtgcggacgtccacaacgtgcacaacgcgtgtattcacgacttgagaacttagctggacggttgcacttagcaatcattgattttttagccaatttgtggaacctcctttatttagcaaacggcataccgagttgagcaagtaattcgcgggattcttcgtcagtttgtgcagttgttacaataacaacatctaaaccacgaactcggttaactttatcataatcaatttctgggaaaattaattgttcatggataccaagagtgtaattaccacgaccatcaaatgccttgttacttacaccatggaaatcacgaactcgtggcaatgccacattaactaatttatctaagaaatcatacatacgttcaccacgcaaggttaccttagcaccaattgacataccttcacgaagacggaaaccagcaattgatttcttagccttagtaattaaaggcttttgaccagaaatcaagccaagttcttcaacagcttcatcaagattcttggagttagtagttgcatcaccaacacccatgtttaaaacgattttgtcaatctttggtgcttgcataactgaagagtagttaaacttttcaattaatgctggacgaatttcattttcgtatttagctttcaaacggttttccattagaagttattcctcccttccttaaaaattagtcaagtgtcttacctgacttcttcgcaacacgaaccttcttaccatcaacgaacttgtaacctacacgagttggttcatttgttgaaggatcaatcagcattacgtttgaagcattaattgcagcttctgtatcaataacgccaccattagggtttgagttgcttggtttttggtgtttcttaacgatatttacaccttcaacgataacgcggttttgagaagcaagtacctttttaatagtaccttctttgcctttatccttaccagcgattacgcgaaccttatcacctgttttaatgaacatgttgattgtgcacctccttattttcggtaaaatctttagagaacttctggagctaatgaaacgatcttcatgaagtcgtctccacgaagctcacgagcgattgggccaaaaatacgggtacccttagggctcttgtcgttgttaattaaaacagcggcattttcatcaaacttaatgtatgaaccatccttacggtgaataccatgtttagtccgtacaacaacggccttaacaacgtcaccctttttgacaacgccacctggtgttgcctgctttacagtagcaacaatgatgtcaccaatattacctgttttaactcgggaaccacctaaaatcttaataactaagatttcacgagcaccggagttatcagcgaccttcaaccgactttcttgttgaatcacggttaatgtcctccttccatttacaaataagaattagaatacgaataatttttagagttatctgctaaattaaagggtagcagctttttcgacaatctttacaagacggaaacgcttcttagctgataatggccgagtttccataatttgtacagtgtcgccggtcttagcttcgttgttttcatcgtgagcatagtacttctttgagtacttaacacgcttaccatagataggcgcactcttgtaagtatcaattacaacagtgatagtcttatccattttatcagaaacaacgtggccttggtaaaccttacgtgcattacgttcttcactcatgcgctaatcctccttttcgtattcttatttgtttaattcttgttgacgaagaactgtcttaacccgtgcaatatctttgcgtacttgcttaagacttgcagtattttccaactggccggttgctaattggaaacgtaagttaaacaattgttccttcagttccttttcacggtcaagtagcttatcagtggttaatccattcagttcttgtacataatctttacttttcattagattgtccacctacttcctcacgttgtacgatcttagtgcgaactggcaacttgtgaccggcaagacgtaaagcttcacgagcgacttcttcagaaacgccccctacttcaaacattaccttgccacgttttactggagcaacccatccttcaggagcacctttaccgttacccatccggaccccaacacctttactagtgtatgagagttgtgggaagattttaatccaaactttcccaccacgcttcatgtaacgcgtcatagcgatacgagcagcttcaatttgacggttgctaatccaatgtgaatcaagagcttgtaaaccaaattcaccaaaagtaacagttttaccacccttagcttcaccgcgcatatgaccacgttgaaccttacggtgctttacacgttttggtactaacatgtgttacttccctccttgttcatcattgtttgagttcttcttagtaggaagtacttcaccacggtaaatccaagtctttacaccaagaacaccgtatgtagtgttagcttcgtcccaagaataatcgatatcagcacggagtgtatgcaatggaacagtaccatctgagtatgattcgatccgtgacatatctgcaccgttcaaacgaccagcaacttgagtcttaatacccttagccccagcacgcatagcacgttgcatagccccacgcatagcacgacggaaagcaatacgagcttctaattgccgtgcaatactctcaccaacaaggtgagcatctaaatctggcttcttgatttccacaatgttaatgtgaacacgtttaccagttaatttgttaagttctttacgaagtgcttcaacttctgaaccacctttaccaataaccattcctggcttggcagtatgaattgatacgtttacgcggttagctgcacgttcaatttcaacggttgatacagaggcatcagcaagtcgcttttcaatatacttacggattcgaaggtcttcgttaaggtaatcagcaaagtccttgtcagcgtaccactttgcagtccaatcacgaatgaccccaacacgaaaaccattaggattgatcttttgacccactattcattcctcctatcgttctgtaacaaccactgtaatatgactagtccgcttgttaattggagaagcagaaccctttgcacgaggacggaaccgtttaagagttggtccttcgttagcaaaggcttcacttacaaccaatgaagcacgatctaagtcgaaattgttttcagcgtttgcaacagcagattttaatactttttcaacatctgaagcggcaccacgaggggtgaacttcaaaatagcaaatgcttcggcaacactcttgccacgaatggcatctaatacaagacgaaccttacgagcagaaacccgtaccatcttggcagtagccttagctgacgtaatgttttcagccatatgttatttcaccctccttacttacctgtcttcttgtcatcagaagcatgaccatggaaagtccgagtaggaacaaattcacctaacttgtgaccaaccatgtcttcttgtacgtaaactggcacgtgcttccgaccatcatatactgcaaatgtgtaaccaataaaacttgggaaaatggtagaacgacgtgaccatgtcttgatgacagtcttcttttcagaaccttcttgctccttaaccttcttcagtaatgaagcatcagcgaaaggtccttttttcaaactacgacccatttagtgtacctcctctcgggtattagaacgtatataaatattaacgagtatgtggaccgcgcttccgaccacgaacaatgaacttgtttgaacgagctttgtgtgaacgggtcttcttaccaacagtcttcttaccccatggagaaagaggagatggtaaaccaactggttgcttaccttcaccaccaccatgtgggtgatcgttagggttcataacagaaccacgaacgtgtggacgttgaccagcataacgagtacgaccagccttacctttaataatcaaggcgtgttcatcattaccaacagtaccgatagtagcacggcaagtagcaaggaccatacgaacttcaccagaagaaagacgtactaatacgtatttttcttccttaccaagtaattgagctgaggcaccagctgaacgagcaagttgaccacctttacctggttttaattcaatattgtgaataacagtaccaactggaatgttctttaaaggaagagcattaccaaccttgatatcagcatcaggaccagattgaacggtcatgccaaccttcaagcccttaggtgcaatgatgtatgatttagtaccatcagcgtaaacaagtaaagcaatatttgcagtacgatttggatcgtattcaattgccttaacagttgctggaacatcatctttaattcgcttaaagtcaataatacggtattgacgctttgtaccaccaccacggtgacgaacagtaatatgaccatagctgttacgaccagcagtgtgctttaacggagccaataatgacttttcaggtgttgtcttcgtgatttcagcgaagtcgtaaccgttcatattacggcgaccgttagtggttgctttatatttacgaattcccactgttttttcctcctttttttaatgattagttttcgttgttgtcgttaaacaacttaatttcatttgagtcggcagataaagtaacaatagccttacgacgacgcttagtgtatccttcgtaacgaccttggcgctttaacttaccttttacattcataatgttaacttttacaactttaacgccaaaaatttcttcaacagcatttttaacttgtgtcttagttgctcgtaaatcaacatcaaaagtgtaacgcttgttgtccataccagccattgaagcttcagtaactactggacgtaaaataatgtcgcgtgcttccattatgcgagcacctcctctacttgagaaagagctgacttagtgataacaatcttttggttatcaacaacgttcaagatgttaacacctgctggagtaacaactgtagcattagctaagttacgtgctgataaagcagcattcttgtcgtcatcagtaacaacaactaatgtcttttcagcaacgtttaagttacccataacatcagcgaattcctttgtctttggtgcatcaaagtttaatgcatcaactactacaaagctgttatcaagaaccttttgggaaagggcagacttgattgcaagttgacgaaccttacgaggaaggctgtacttatatgaacgtggagtaggtccaaaaacaataccaccaccacggaattgtggagaacggatagaaccttgacgagcacgaccagtacccttttgacgccatggcttcttaccaccaccgctaactgcagaacgattctttacagcatgtgtaccttgacgtaatgaagcacgttgacgcaaaattgcatcaaatacaacattttcatttggttcaacaccaaatactgcatcgtttaattcaacagtaccgttttggctaccatcttgtttatataaattaacgctagtcattatttacttcctcctttcttcttatttattgtgttgtttgctaagactcttcttagtattagccttaactgagttcttaatagttacgtaagacttgtttgcaccaggaacattacccttgatgagtaatacgttgttgtcaagatcaaccttaacaacttgtaagtgttgcatggtaacagtcttgccacccatacgaccagggagcttcatacctttgaaaacccggttgataatggcacccaatgaaccaggacgacggtggtaacgagaaccgtgtgccataggtccacgagattggttatccttatggatgttaccttggtaaccatgacccttggtagtacccgtaacgtcgacagtttcaccttctgcgaaaacgtcagccttaacttcgtctccgactttaatgtcccctaattcagcgtcgcggatttcaccgatgaagcgcttaggggtcgtgtttgcttttgctgcatgaccttgttcaggcttgttgctcaaaacttcccgcttgtcatcaaaaccaagttgtacagcactgtaaccatcgttttcaacggtcttaatttgcattacaacgtttggtgtaacatcgataacagtaactggaactaattcaccattgtcagtgaatacttgagtcattccaacctttttacctaagattcctttggtcatgagtacacctccaattttatgttttatgtattattcttattctaataattaaagcttaatttcaatatcaacaccactaggaagatcgagcttcattaatgaatcaacggtcttaggtgttgggtcaacaatatcgattaaacgcttgtgtgtgcgcatttcgaactgctcccgtgacttcttaaatttgtgtggtgaacggataacagtatagatagtccgttcagttggtaatggaataggacctgaaatttgagcacctgtccgcttagcggtttcaacaatcttatcagcagattgatctaaaatacggtgttcataagcctttaaccgaatacgaatcttttgttttgccattatgttccctccttcgtcagatttgaaatttgactagctccgcggaaattaccgccacatcctgtggcaaagcggccgggtgtgtcgcaaccttccgcatcaacgcttcgcagctttcacttaatagggggtaaggcaaatctacctccaaagctcaagcacttatccataatactaaagaaacgtaattagatcaagggaaattttcgaatattttcaattgaaatatttttgtaaaattttcttcctaagttagttaaaaattagcgatactaaaataccattaatttttctgatgtattaaaaagtaatttatttgttttgacgaaattcattaaaatgctttttgaatttttatcatcaaacaaaaaagaactacagtaatcaaactgtagctctttgatggacttgagatcacaatgtcaataattagttattgccaccgtttttcttaataatatcttcttgaacagacttaggaacagctgagtagtgatcgaaagtcatagtgaaggtaccacgaccttgtgttgctgaacgcaatgcagtagcgtatccaaacatttcagaaagtggaacaaatgagtggattaattgagcattaccacgttcttccataccatcaatggtaccacgacgagctgttacttgacccataacatcacccatgttgtcttgtggtacaacaatgtcaaccttcataattggttcaaggataacaggatctgctttcttagcagcattcttaagtgctaatgatgcagcaaccttaaaggcggcttcactagagtcgacttcgtggtaactaccatcataaagtttagcatgcatgtcaacaagtgggtaacctgcaagaacaccattttgcatagcttcctttaatccttgttcaacagcagggataaattcacgaggaacaacaccaccaacgatggcatcttcaaattcgaatccttccccttctttaagtggtgtaaattcgatccatacatcaccgtattgacctttaccaccagattgacgaacaaacttaccttgagcacttgcagtcttagtaaatgcttcacggtatgaaacttgtggcttaccaacagtaacttcagcgtggaattcccgacgaagacgttcaacaataatgtccaagtgaagctcacccataccagcaattaaagtttcaccagtttcaggattagtttcagccttgaatgttgggtcttcttcagcaagcttttgaagacccttgtccatcttatcttggtccgccttagacttaggttctacagaaacttggataacaggttctgggaagtccattgattcaagttgaagtggatggtcaggatcagttaatgaatcaccagtagtagtgttcttcaaaccaatagcagcagcaatatcaccagagaatacttctggaatttcttgttgttggttagagtgcatttgaagcaaacgaccgatacgttcacgcttgtccttagtagcattaagaacgtatgaacctgattgaagtgaaccagtgtaaacacgtaagaatgtcaaacgaccaacgaatgggtcagtagcaatcttaaatgctaaggcagcaaatggcttatcatcaccagctgttaattcaatttcatttccatcagcatcatgagcaacgaatggcttaacatcaagtggtgatggaagataatcaataacagcatcaagcatcatttgaatacctttatccttgtaagctgaaccagctaatacagggaaaatttgttcttccaaagtacctttacgaatagctgctttgatttcatcaacagaaatttcttcaccttcaaggtacttttccattaagttatcgtcaatatcagctaatgtttcaaccatttcgtcatgacgcttttgagcttcttccttcatatcatcaggaatctcaacagtatcccagttagtaccgagcttatcttcgtcataaacataggcaaccatcttaacaaggtcaactaaaccgataaagtcatcttcagcaccaattggcatttgaataggaagaggagtaacattcaaacggtctttaatagtttgaactgagtaatcaaagttagccccaatcttatccatcttgttcgcaaaaacgatccgtggaacgttaaattggtcagcttgacgccaaacagtttctgtttgtggttcaacaccagcttgagcatcaagaactgttacagcaccatcaagaacacgtaatgcacgttcaacttcgacagtaaagtccacgtgtcctggagtatcaatgatgttgatccggttatctttccaaacagcagtagtagctgctgacgtgatagtaataccacgttccttttcttcatccatccagtccatttgtgaagcaccatcatgggtttcaccaattttgtgaatcttaccagtgtaatatagaatccgctcagttgcagtcgtcttaccggcatcaatatgtgccatgataccgatgttacgagtcttagcaagtgggtattcacgtttattagccatcttaaaagagtatctccttccgaaatatggttatccttattttaccattattttcaaaaaggggtgacgtaatcgatgtttgaacgtcacccccttcactgaaactagttaaataaccagaatcaaatgacagtgattattaccagcggtagtgtgcgaatgcacggttggcttctgccatacggtgcgtatcttcacgctttttaactgaagctccagtattgtttgaagcatcgatgatttcacgtgcaagacgttcaaccattgtatgttcaccgcgcaaacgtgcgtattgaacaatccaacgaagacctaatgtagtacgacggtctggacgaacttcaatcggaacttggtagttagaaccaccaacacgacgagccttaacttccaagacaggcataacattttccattgcttgttggaatacttcaactggatcattaccagtttcgttcttaatttcatcaaaagcagcgtataaaatcttagtagcagttccacgcttaccatcaatcattaagtgatcaattaagctagtaaccaactttgagttgtacattggatctggtaaaatttcacgcttttgtacatgtcctttacgtggcattacttaactcctccttaaaattacttcttatccttaggcttcttagcaccgtacttagaacgtgattgcatacggccttcaacaccagcagtatctagagtaccacggatgatgtggtaacgaaccccaggtaaatccttaacacgaccaccacgaattaaaacaactgagtgttcttggaggttgtgtccaataccaggaatgtaagcagtaacttcgattaagtttgaaagacgtacacgggcgtacttccgtaaagctgagttaggcttcttaggagtcatagtacccacacgagtagcaactccacgcttttgtggtgatggagtcttaatttcttctttcttgaaagtgttgtaaacataaccaagagctggtgactttgacttgcccttgtggctcttacggcctttacgtaccaattggttaatggttggcattattttttccccttccttaatttaagtccacacatccaggcggttcttttttatggataaaaaaagtcctgtatgtatttatacaatttttgtgccttcgttgacgcatctgcccaacgacagacactccgttgctaaaaaagcaccttaaatagactatcatgctcacaaatgaatgtcaacgtatccttatcgatttcttttaaatcgttaatttaaaagtgaatttcattaaaaattacgtatttatttattgggaggtttttcatgttagttttattatttttatttggtgcttctgtcgcttcatttattacttcttgttgctatcgtctaggcaataattgctctttaatcattcctcagcggtcatattgtgacaattgccattctattttgcgatggtggcatctcatccctatttttagttttatcatccttcgcggtcaatgcttttattgtaaacaaaaaattagtttatatctgcctgtaattgaattcttatccgggattgcttttatcactttcatcagctatgaacctattcatgacttaatcattcttctctttctcactagcttaatcttcttaacttctactgatttttttagtcatgtaatctattcctattcactattgggactatttcctatttccttattatccattccacaaaattatttttacaatttgatttttgcctgtattctagcagtcagtttactattgttcactatttttactaagacactaggaattggtgatattgaatttttatttgtaatatgtctgatatggggatggtaccaaacactcataattatccaatggagttctttaatcatgctattcatctttttgtttacaagaaaaaagaaactaccatttatccccgcactagctttcactactattctgtgtcttcttatacaaggctgttaaaaaataaaagaccaggataccctagtcttttacaatatttaattagtatcatcttttactggtttgagttttactacaaataagttttgcccaaattgagcgaggttttcaatattttgtagtaataagagcaaccaagaaaaagctaagccaaattcaaataattcgaatgcagttaaagaaagataatcagttaacttaaaaacaatatattcgatactcattgcggctccaatcgtataagaaatcaccaaaaattgtttagtgacttcgggtagaacccacctaataactacaatcagaattagcataatataaacaagccacattgaaattctgtcatgtaaaacgtgaaattctggattattgggaaaaagaccaatagaagcaatacagatagctagcataattaacagccaccgcaatacttgaattttataaccatgataccgacgttgaatatttacaaacaagtaatcaactaaagcaatcattagtaatccagtaaaaatcaaagttatattaaattgcaaactggtggaattttttgccgttcctaaaaaactaaaattataacgccaccaatctcgtttagaattcgtcagcattgaaaaaagcattccaccaatgatcattattgttaataaattggtgataactcccgatgataatgttaaagccaagttaatcataatataatttattgccgcaataattacaaatacaaaagcagttgctgtataaatatcaaaccgtgcatccttaaacatctggccaaataaccaaaaaattgccgatagtgagaatgcaatgattagtccacatgcaatcgtaattgttggcaaactccgccaatgaaaatccttgctgggcccttttccgagaattttagtaataataaaagttatcaaaaacgataggattccactacatactcctaagattaatgcaccattagcaatggaataatcatcacctgttatcgggaccgtgttaatttttctggcgctaaaaaaagctaaaaatattgcagctaaaataattgaaggaatcacataccagaaaatgttaattttaggtagttgatcactcacatttattggacggatgttaatttgtttatgattaacactaagagagagctcttcgttcgtagagaagtctgtctttttaaatgctgagtcaggaatttctatctgatatttttttgccaagtaatcacctcattttaaactaaaaaggcaatggccccttcacaggttaaccattgccttttttataaattagttttgcttatcttcttcttttaacttagcctcaatatctttaattgagtaagcagctacactaacttcttttggcttgatgttccggtaagcactcataccagtacctgcaggaataatcttaccaataataacattttctttcaatccaaccaacggatcgttcttaccacgaatagcagcatcggttaatacacgtgtagtttcttggaatgaagcagcggacaagaaactgtttgtctctaaggcagccttagtaataccaagaataacaggacgagctgttgcaggaatatttccagcaactaaggtatccttgttagcgtcacggaattgactgatatccatcaattgacccggtagaaggtcggtatcacctggatccatgacacgaactttccgcatcatttgacgaatcataatttcaacgtgcttatctaacaagtcaataccctgcatccggtaaacaccttgaacttgcgataagaggtaagtttcagtagaaagaacatcacaaacctggattaattccttaggatcaatcgaaccttcatttagcggtgccccacggtgaatgaaatcaccttcagcaactttcatccgtgctgtaattggaagggtgtaagttcgggtatcagtctcacccttaatcgtaatatccttcgtccattcagcaggattttcttcgatagacacaacttcaccagtaacctctgtaattgttgcccgacctttaggattacgtgcttcaacaatttcttggatacgtggaagaccttgagtaatatcatcgttaccagcaaccccaccagtgtggaagttacgaagggttaactgagtacctggttcaccaattgattgagcggcaacagttccgacagcttcaccagcttctacacggtcaccagtagctgcatttcgtccataacaacgttcacatacaccatgttcagtgttacaagtaaatgctgaccgaatagttactttctttacgccggcatcaacaatcttttgagccatttcttcgtcgataaggacattcttaccaacaatcttttcaccagtcttaggatcaaagacagacttcatagtgtaacggcccatgattcgatcataaagtggttcaatcatttcgttaccgtttgtaatagcagtaacttcaagtccgcgatcagtaccacagtctttttcacgaacaaccacatcttgcgcaacatcaaccagacgacgagttaagtaacctgagttggcagtcttcaaggctgtatcagtcatacctttacgagcaccgtgtgatgaaataaacatttccaacactgaaagtccttcatagaagtttgacttaacaggtaattccataatcttaccgtttggtgatgccatcaatccacgcattccggctaactgagtaaagtttgaaatgttaccccgcgcaccagagtcggacatcatgttaattgggttatggatatccatgtgttcaattaacttgttttgaacttcatccttagcatcgttccatgcaccgattactcgttcataacgttcatcgtctgtaattaaacctcgacggaattgcttagtaattaaagcaacttgcttttgtgccttatcaagaatttctggtttttctggtaaatcatgaatatcagacatagcagtcgttagaccagaaatagttgattcgtagtaacctaagtccttaatacgatccaagaattgagaagtcttcgtaactttgtaacgcttgtatacttcagcgatcaagtcagataagaagcccttcttaaatggtggaactaatggtgcattttcaaggtattcatgaatatcttgaccaggttcaaggaagaaacgatcatcaacaccattttgaatatttgcatctgttggttcgttaatgtaagcaaaatcttttggcataattcggttgaaaagaagcttaccaacagttgtcaccatgatcttgcctcgttgttcatcagtaaatggcttttcagggaatgcagatacttgaactccaacacgggtttgtaatgaaacatagtcattgcggtaagcaagttcagcttcatcagtatctttgaagatcattccttcaccttcacgacccttatcttcagtagtcatgtagtagttaccaataaccatatcctgtgatggtgaaacaataggttctccgtcacgaggactaagaatatggtgagcagcaagcattaacaaacgtgcctccgcttgagcttcatcagataatggaacgtgaatagccatctgatccccatcaaagtcagcgttatatgctgaacatactaatgggtgaagacgcattgacttaccagaaaccaagattggttcaaacgcttggatacctaaccggtgaagagtaggtgcccggtttaatagaactgggtgttccttaataacgtcttccaatacatcaaagacatcatcatcactgcgatcaatcttacgcttagcagctttaacgttagcggaaaggccacgttttaccaattcatgcataataaatggcttaaataattcaagtgccattggaactggtaatcccatttggttcaacttcaatgatggaccaacatcaataacggaacgaccagagtagtcaacacgcttaccaagtaagttttgacggaaacgtccttgcttacccttaagtaagtgagaaagtgacttcaatggacgattacctggtccagctactggacgtccacggcgaccattatcaattaatgcatcaacagcttcttgtagcatccgtttttcattttgaacaataattccaggtgcttgtaatttaagaagtcgctttaaccggttattacggttaataacccgccgatataaatcgttcaaatcggaggtagcaaaacgtcccccttcaagttgaaccattggccgcaagtcaggtggcataactggaattacatccataaccatccattcaggcttatttcctgacttaatgaaagcttcaagaatatcaagacgacgaatagcacgagtccgtttttgaccagtagcttctttcaattcttcttttaattcagcagcttccttttctaagtcaacatcggctaaaagtttttgaatagcagcagctcccatttcagctttgaaacggtcaccatattctgcttttttatcacgatattcagcttcagttaaaagttgtttcttttcaagtggagtatcacctgggtcaagaacaacatatgaagcaaagtaaataacttcttcaagtgaacgtgggctcatatctaatacaagtcccattcgacttggaattcctttaaagtaccaaatgtgagatacaggagcagctaattcaatgtgccccatccgttcacgacgaacttttgcactagtaacctcaacaccacaacggtcacaaacacgacctttgtaacggatacgcttgtactttccacacgcacattcgtaatccttggttgggccaaagattcgttcgtcaaacagaccttgcttttctggctttaatgtccggtagttaatagtctcgggctttttaacttccccatatgaccaactacggatcttatctggagatgccagaccgatctgcatactttcaaatttattgacatcaatcaaaggatgttcctccttctttcagtaaaccgtagcaacctaaatattaattttgattagttttgtcatcggtagttgttgaagttgcttcagacttgttttcttcttcgttcttcttatcgtctgttttatgttcttctgcatatttagctaatgcatcaacatttacaacttcatcatcatcttcgtccatgttctttaactgaatttccttgttgttaccatcaagaaccttcatatcaagacctaatgcttgtaattccttaacaagaacacggaatgattctggaacacctggcttaggaattggttgaccattgatgattgcatcataagtccgaacacgaccaacagtatcatctgacttgtaagtaaggatttcttgaagagtgtaagcagcaccataagcttcaagagcccaaacttccatttcaccgaaacgctgtccaccaaattgtgccttaccacctaatggctgttgagtaacaagtgagtaaggaccagttgaacgagcgtgaatcttatcatcagccatgtgagctaacttaaggtagtgcattgaaccaacagcaatccgattttcaaatggttcaccggtacgaccgtcataaagaattgtcttaccgtcttctgggaatccagattcacgaacagcatcccaaacatctttatcagatgcaccatcgaatactggagtagccatatgaattccaagacgacgagcagccattcctaggtgcaattcaagaagctgaccaatgttcatacgacttggcacacccattggactaagcataatatcaatcggagttccatctggcatgtatggcatatcttcttctggtacaacgatagaaacagtacccttgttaccatgacgtccagacatcttatccccaacctggatcttccgcttttgtgcaatgtaaacacgaaccattgtatttacacctggtgataattcatccccattttcacgagtaaagactttaacatcttggatgattccgccaccaccgtgaggaacacgtaatgaagtatcacgaacttcacgtgacttttcaccaaagatagcgtgaagaagacgttcttcggcagataattcagtcattccctttggagtaaccttacctactaaaatatctccatcatgaacttcggcaccgacacgaacaattccgttttcatcaagatctttcaaagcatcgtcaccaacgtttggaatttcccgcgtcatttcttcaggtccaagcttggtttcacgtgcttcagattcgtatgattcgatgtgaatagaagtataaacatcgtctttaactaatcgttcattaatggcgatggcatcttcgaagttatatccttgccaagtcatgaaggcaattaatgggttttgtccaagagctaattcaccttgttccattgatggaccatcagctaacacgtcatcagcatcaacatgttcgccaaccttaacaattgggcgttggttgtagttcttaccaccgtttgaacgacggaacttcattaacttgtaagtatcaagtgttccatcttcctcacgaacccgtacttcacgagcatctacatattcaaccgttcctggcttcttagcaatcatcgcaaccccagagtcatgggcagccttgtagtcaataccagtacttaccaatggagcatgaggattgatcaaaggaacagcctgtcgttgcatgttagcacccatcaatgcacggttggagtcatcgttttcaaggaatgggatacatgcagaggcaacagaaacaacttgcttaggagaaacatccatgtagtcaatgttttcaacactggtttcgatgtagtcatctttatcacgagccattacttgatcgtcaacaaatgaaccatcatcatttaatggcgtgttagcctgagcaatgatgaagttatcttcttcgtcagcagttaagtaatcaatcttatcagttaccttgtgatccttccaggaaacacgacggtatggagtttcgatgaatccatatttatttacccgtgcgtaagatgaaagactgttaataagaccaatgttaggaccttctggtgtttcaatagggcacatccggccatagtgagtatagtgaacgtcccgcacttcatatccagcccggtcacgagttaaaccaccaggaccaagagctgaaagacgacgcttatgagttaattcacctaatgggttagtttggtccatgaactgggaaagttgggatgaaccaaagaattctttaatagaagcaaccactggacgaatattgattaattgctgtggagtaacagtgtcaggatcttgaattgacatccgttcacgaacaactcgttccatccgtgcaagaccaatccggaattggttttgaagtaattcaccaactgaacgaatacgacggttacctaagtggtcgatatcgtctgtactaccaataccttcttgtaagttaaagaagtagtttaaggaagcaagaatatcagctggttcaatgtgcttgtattctaatgggatatgaccgttaccaataataggtacaactcgatcaggatcagtcttagaatatactaaaatcttttgtaacttaactggttcagttacaaccgcttcatctgatggagtgtaagtaatagtcttaaagtcatcacggtctaagtaaggttcaagcttattaagcaattccttagttaccgtatcacctttttgtgctaatacttcaccagtatcaggatcagctaaagtttcagctaaagtttgtccaagtaaacggtacttaagcattaacttcttatttgtcttataacgaccaactggtgccatatcataacgttttggatcaaagaaacgagctgttaataagctccgtgctgaatcagcagtctttggttcaccaggacgaagccgttcataaatgtcctttaaggcttcttcaacccgagaatcttcagcgttcttgtgaacatctttatccaaggttaatgataatgtctcactatcgccaccgaacatgtcaataatttcatcgtcagagccaaagcccaatgcacgaatcaattcagtcattggtaacttacgggtccggtcgattcgaacatatgaaacatttttagcatcagtttcgtattctaaccatgcgccacggtttggaataaaggtagcaccgtagtttggccgaccatttttatcattttcttcactatagtagacacctggtgaacgaactaattgtgaaacaataactcgttcggcaccattaataatgaatgtaccttggtcagtcattaatgggaagtcaccaaagaatacatcttgagacttaatctcaccagtttcatggttagttaaccgtaaagtaacatgaagtggtgctgagtaattagcatcgtgttcacgagcttcgtcaacagtatacttaggttctaaaagttgatagtcaacgaattccaaagaaagttttccttgaaaatcatcaattggcataatatcatcaaacatttcccgcaaacctttttccatgaaccaattgtaagaatcggtttggatttcaataaggtttggcaattcgagaacttctttaattcgcgagtagctacgacgggtacggtgtttaccgtatttaactaaatgtccagccaaactgttcacctctctaatttattccgcgagctcatttaaatgttacaatttgattacaatttgcctaaaatacgacttttgggcaaaaaaaatccaaaaacagttcaacgactgtctttggcttttatgcagaatctgatggacaatagatcaccaggttcaaatgaactcacaattacatactatttaagtatacaagttctattaaatttcgtcaacaattatttttatattttttaattttttccgccccaatttgataaaccgttaataatgcagtctaggattaattggtcacgttgttctggtgtaattgaatggccaccaattaattgcgaagtgccaaaaattggagttagtcctgcaataaataattcagcagcttctttaggaagaatatcaggacgtaaccctacatctggttgacggaaaaatgctgcaattggttctagataatccattgtaaagatcatattaagcttttgctgtgcactcttcgataataggcgcattgcctgattgtattggtcataaatacttaatggatgatgtttttttaatgccttggtgatttgccataattgttcattcggtgacaaatcatgtttacgcattactttattaatatcttggcgaacttttccacataaatttgtcattacatccagatataaaacctctttatcgctgaagtggtggtataaagccggttgcgtaattccaatctgtttggcaatatcccgtgttgaagtttcaccaaatcccttttgtaaaaataactttgtagcggtttttaagattgcttgtcttgtcttttctaattgttctgctcgcttcatttattgttcatcccctatttttaatcattaattatctgataaacacattataaggctataacttatcttttgacaaccgttttagaaaaataatcatcaaatgtgataaatgaatgcaatttggtagctttttcttctattatcattagatatcattagagaacaaaagttacaattataacatttttataatacataaaactcaaatattcggtttgtgtatttcaaatttaatgaaaccagaatacaaaacggtaaattactctgcactttcagaataatttaccgttctttttatctattcaattttaattcaacagctttatcttcatctggcttttttactttaaaagtaattttaccgtgatgcgcacctactgttacgtcatctccaacattgatttcaccactaagtagtccagtactcaaatcatcttcaacatgatcttgtaaggcacgacgaagcggacgagctccataagcaggattgtaaccaagctttgcaattacatcaattgcagcaggcgtaactttcaagttaatgccttgctcacttacccgtttatttaaatcattaaccatgagtttaacaatttgatgaagctctttcttttgtaatgaatggaagataatcgtttcatcaatccgattaaggaattctgggcggaagtataacctcatttgttgcttaatcgccgctgccatcgcattatagtcttgtgacatatcttttgccccaaaaccaacttctttttcatcctgaagctgagttgctccaaggttagaagtcataataataatggtatttctaaaatcaacgcgccgaccttttgcatcagttaagtaaccatcatctaaaacttgaagtaataaattaaatacatccggatgtgccttttcagcttcatctaataagacaactgaatatggatgttgccgtactttttcagttagttggccaccctcgtcataaccgacatatcctggagcggcaccaatcaagcgactagtactatatttttccatatattcggacatatcaatccggatcatattatcttccgagccaaacattgcagcagctaatgccttggcaagctctgtttttcctaccccggtcggtcctaaaaacataaaagaaccaatcggccgactaggatccttaagaccgcttcgtgcacgccgaattgccttagcgactacggtaactgcttcatcttgaccaattactcgttgatgcagaaccttttccaagttaaccaatcgttcactttcactcttcttcaattgagttaaaggaactcctgtccattcagcaacaacttgtgcaatgttttcaccagttactttcaatttgtagttatgagaatctttttgttgagtgcgttgttttttacggtcaatcttatcttttagtgctaactcctgttgacgaagagtagctgcacgatcaaagtcttgattatcaattgcttcttctttttgggttcgcaaatcttctaactgactttctagtgaaggctgatgatttttcttatcttcagcatcaattcgaaccatagctgccgattcatcaataagatcaattgctttatctggcaagaatcgatccgaaatataacgatctgacaatttaactgcttcttctagcgcttcatcagtaattttagcatgatggtgctcctcatactttggtcgtagtcctcgcaggatttgtagagtttggtcagtagtcggctcatcaacttgaacagtggcaaagcgtcgttcaagtgctgcatccgattctatatatttctgatattcatcaagcgtagtagcaccaattgtttgcaactcgcctcgcgctaaggccggtttcaaaatattggaggcatcaattgcaccttcagcaccaccagcaccaattaaggtatggagttcatcaataaaaagaatcacatgcccgtcgttttgaatctcatcaattacttttttaagacgatcttcaaattctcctcgatacttggtacctgcaactaatgatcccatatcaagcatcatcaaacgtttattagccaattcagctggaaccttaccatcaaccatccgctgagcaagtccttcagcaattgccgtcttccctactcccggttctccaatcaaaactgggttattcttggtacgacgactaagaatctgttccacacgtttaacttccttatttcgaccaattacaggatcaagctgaccattccgagcaagttctgtcatatcacgagctagtttatctaatgttggtgtaccagtttgctgaatccgtcgacgagatgattgacgattaggattgcgttgctgactatcagcaatccctaaccgccgtaaaattacttttctcatctgtcgtggcacaacatctagactatataaaatccgtgaagatagaacactttcatcagcgattaaggctaataataagtgttcagtgccaatcttcaatgcatgcatttgttgggcttctttacctgctaacgataatacttgctttgcttttggtgagtatgggagataatctgaagctcccagattttccatcgttccatagccaattaagcgttcaatttcttcacgaatatcatcgttcgtaatagaaaattgttcaaatattttgttagcaatcccatctttatccattgagagggcaagcagaaggtgttcagtccctactgcttggtgtttaaagtattttgcttgttcttgtgcaattgctagaacatgctttgcacttggcgtgaacatattatccatgtacaatctcccttttaactttcatagcgaagtcgattcaagaatgatactaatatacgggcgcgaagttgatcttcaatcttactatcattaactgctagtgcttgtttagataatgcaactagcattaagtctccttcacgtctcgtaatcacgtcttcttcatataacgttcgaacaatatcaaaagcatcacgttcacgaaccgagtcgccaattgcttgaataagtgagtttagcacatttacgtcatcaagtaaattaactcgctcgattcgaatatatccgccgcctccacgcttactctttactaaataaccattttgaatggtaaacctcgttttaataacataattaatttgtgacggtaccacatcaaactggttggcaatctcagaacgacgaatttcgacctgagctgagtcaccaagtatttcttttaagtatgcttcgataatatctgaaatacttttattctccattatatcacctcggctcttttgactaatcttgaccattattttaacacacttttagagtcagcgcctacttgtatgatcattcagttacacatttaagaaaataataaagactagcgaagcattcaagcgcaacactagtcttttagagaattaaatatgaactacttttttaattagtcgttatcgttgtgaacaaaatcaacaacattccgaccaacaaccttgttatccttaagttcttggatcatatcattaatttcgcttaacttacgagtcttaacaattgggtgaaccttaccttctgcaccaaattggaaacattcagctaagtcttgacgtgtaccaactaatgaaccagcaacaatgataccatcaagaacagtcttagcaatgttaagcttcatgtcaccttgtggaagcgcaacggcaacaagcttaccatctgggcgaagtgaatcaactgcttgatcgaatgcagagggagaaacagctgttactacagcagcgtgaacaccgccaaccttttcttgaatttgcttatcaacatcaccgtcatgacggttaattaaaatttcagcaccattcttcttagcggcttcaagcttatcaggattaccatcaacagcgataacatgagcaccaaatacgttgtgagcaaattgaatacccaagttacctaaaccaccagcaccaacgattgatacccattgacctggcttgatgtcagcaacctttaatgccttgtacatcgtaacaccagcacaagttaatgaagtagcttcaacaggatcaagaccttctggaaccttaacagcgtagtcagctggtacgatacattgttcagccattgcaccgtcagcagtgtaacccgcattaagaacattccgacaaagagtttcacgacctgttaaacaatattcacagtgtccacagcccttgaagaaccatgcaattgatacacgatcgccaacttttaatgaagtaaccccaggggcaaccttagatacacgaccaaccccttcatgaccgataatacgacctggcttcttaccaaagtctccagcagcaacgtgtaaatcagtgtgacaaaggccacaatattccatgtcaactaaagcttcaccgggctttaaatcccgaagttgaacatctttaacagtaacaaaaccgtctactggatcgttaataacagcagctttcataaggtaagatctcctttattaataaacaaattactttttacaatgcttatagtaccacaactcctagacaaatttaaagtgaaaatttgcacatttaacgaaattaataattttattttttatttaaaacactgatataacaatgataacgcccggaaaatcaattcttttaatattgtatagtaaatcacttactaattatcactaaaactttactgttacaattttagacgctctctattaatatggatgttacaatttaatcaattagacaaaggagtggtagctaagtgaaaatgtagagcggcaatatattcgttacaataatcgttatggaacggcaattgctgctgatatctacacccctaagaatctagaagaagacaaattgttatcagccatcgtaatcggggcaccttatggaagcacaaaagaacaggcagcagcaatttatgcaaatacgtttgctcaattaggttttgttacccttgcatttgatcaagtatacatgggtgaatcagctggcgaacctcgtcatgttgcttctccagacttatatgcggaatcttttagtgccgcagttgattatccaggtacaaaagcaaagcatgtcaatcgcggacaaataagtgttatcggtatcagtggaggggcaggctttgctcttagcgctgcggctgttgatacacgaattaaatctgttgtaacaatttcaatgtatgatatgacagatattcgtgagatggctaatcttgctcctgaacaattattccagcttaaagatcaattatcaaagcaacgttgggacgattttgaaaatgggcagcctgactatcatccttccttcccagaagaaccatatgatagtattgacgatttaccaaatcatgatgagttaacaaatgagtggcttcgtttttacgctcttaaacgtggcttccatccaaatacacgtggaactgcaacaaccacttctaatttagcaatgcttgaattttctgcgttagactatattaaagaaatttcaccacgaccaatcctatttatttatggagacaatgctcactcccgttcttattccgagagagcttattaccttgctaaccaaccaaagcaaagattgatcgtaaaaaactgcgaacatattgatttttatgataatatggaaaaaattccagtagatcaaattgcaaagtttataaaagacagtttcaacgcataatcaaacgacaaaatgccaatcagtgcctcaattatggaagcctggttggcattttccttttaaatattttcggaaattaataaaaaactgctatctcttctactatagaagtgataacagttttttaacttatcggaattacaagatttgaacttgcgacctctgcgtcccgaacgcagcgctctaccaagctgagctaaattccgaaaaaataagcgtaacagttaaactgtcacgcttactataattagtgcacccagaaggagtcgaaccttcaaccttctgattcgtagtcagacactctatccaattgcgctatgggtgcatataagcggaagacgggattcgaacccgcgacccccaccatggcaaggtgatgttctaccactgaactacttccgcatgtctctgataagttattccctatcaacgattattaatattacacgaaaatctcatcaatgtcaacaagaattttcaaaaaatattaaatgcggatgaagggacttgaacccttacatcaaaatgatacaagatcctaaatcttgcgcgtctgccaattccgccacatccgcaaactaatggaggatacagggctcgaacctgtgaccccctgcttgtaaggcagatgctctcccaactgagctaatcctccataaataggcttgctatataaatcagcctatttaatatatcatctatatgattttttgtcaaatcctatttaagatttaattcaattaatttttcatcaatcatggctaagaccttcttagcagcagccggatcttcaacaaaatcatatttatcaccatcaataaccatcttaggactttcattataatcctcataccattgaacataacgttcgtttaagtttttataatatgaatataatgaagaatcattagcaatttgttcaaatgaacgtccccgtttcttaatccgttcaagcattgtctcaaacgaaaccctaattgtaattaaaaggttgggggctttttggtgtggttgctctggtaattcttccatcatgttacttaataatgaagaataaatatttgactccgtttccgtagctcgacccatatctgcgtttaacttgaataataaggcatcttcaaaaattgaacggtccaaaacatttaaatcatttgagtatgaatctttaatctcatcaagccgcttgtttaaaaagtaaatctgtaataagaaaccatattttttaggatctttataaaaaagcggcaaaattttattgtcatcaacagattcatagaaggcctggctattaagatggtctgccaacagctttgtcaaactggtctttcctgcaccgattgtcccagctatagcaatcattagttatttccccctgtttcaaattcaaaaagtaacgaaaacaattctaacatttaaaataaaaaggagcgagtattttctcgttccctttttattttattaatcatcttccggttcgtacgattcaccctttgttcgccttgataaatcaaccttatcaagcggaatcaagtgcgtcttgtaacgaatcttgtagtagaagaaaagaattaagaataatggaattcccatgtaagtaattaaaatgttttgccagtccatttttacaaaagcatcaatgttttgaccacaaataacgacaatacatagagtaagcgcgaatactgggccaaatgggaaccctgttgcatgatacttcaattcagacagtgtatggccttgcttaagaaatgccttcctaaagcggtagtgggaaattgcaattcctaaccatgcaataaatccacacaatccagatgcaccaattaagtagttataagcttcgggaccaatgaattgggttgcataggctgctaatgaaacaaccatcgttcccagcaaagcataaatcggaataccatgccggtttacataaccaaaaatccgccatgcatatccttcacgcgcttgtgaataaagcatccgggttgaagcatataaaccagagttagcagcagaaatgacggcagttaagataaccgcattcattgcactagccgcaaatgctaatcctgcccgcttaaacacaatcgtaaatggactcattgtaatatttgaaacgtcttgattcaataagttcttatctgtgtaaggaaggatgcaggcaataacaaaaatagcaaaaatataaaaaagtaaaattcgccagaaagttgaatggattgcctttgagacagacttttctggtgtagcagcttcaccagcagtaattccaactaattctgttccttggaatgagaacccagcaaccaagaaaacactaataattgctggcacacctccaacaaacggtgcctgcttatagtggaagttgcttaatccaactggcttaccacccataattccaaaaataattgcaacaccgacaattaaaaatacgataactgtgacaactttgattaaagcaagccaaaattcagtttcaccataagatcgtactgataaataattgattaagaaaattaatgccatcactgttacactaaaaatccagcctggaacattaggaagccaataattcattacaattcccgcagttgtaacatctacggggattgtaatcgcccagttaaaccaataattccaaccaagagcaaaacctagtgctggatcaacaaattttgttgaataagctgaaaatgacccagttaatggcatatatgttgccatttcccctagactcgtcattaggaaataaaccataattcccataattccatatgcaactaacgctccgccaggtcccgcagttgaaatagcggatccactggcaataaaaagtcccgtaccgattgttccaccaagagcaatcatggacaagtgacgtgtctgtaatgtccgttccatatgacccgtcgacttagattcatctgccataaatatatttcctccaaatttgtgtgccttaacgtcaacattttcgaagaggataaattaaaagggtcttctgatcggtaaccccaccagaagacccaacttaatacctataattaatcgttgaatcaatttaggaagcgccccgcaattattgcgacagtctatagcctattgtgactatagcccaacatctaccagaaataagctaagtagtgtttcggcatattttccttttactaatactccggtgcttattcacctaatactagttactgataaaatatgcaacctcttcatcgaatgaaattataccccactcaaataaaaatgcaagtccgattatttaataatgcattgccataagtcatccttgtcataagtaaaaccacatttaacaagtactcgctgagaacgataattgctttgtttgcactccgcatgaatcgtaattttagatggcaaaatagaaataaatttttgaagtgcagttgtcattatgcctttattccattggttttgctgcaaaagataacctaattcataatgatgagcaattctttttccttcatccccataccaagcacttaatacaatcatccccactacatcttcatttagtttcactaccattacatgattctggcgaacaaacatcttaatagcttgcacacgtttttctctttgaagtggtaaaagcagtcccactgcttgtgttaagttttcattatccaacaatttaactattgctcctaaattgttattagtttttgctgattcaattataatttcactcatttttctcctatttcccgggaaataaaaaagagaagcaaccaaaaagattgccctccatcaatttcgattattaaatttcaatactacggaagaacggaatccgttgcaatcgtggtgcccaagcgacatagagccattcagctacttgtaaccatgcataagctaataacattgcaccaatagtatcaaaaggccagtgagcataaagatatacccgcgataccgccaaaaagaagactgcaaatattaataaaatttgcaaaattgtgcggacagatgctttttgaataagcggaattacaattaagaataaaattgctactaccaagaagaatcctaaagtgtgaccactagggaaactatagccatcatctgctgccaagtgttgtgcaggacggacccgcttaacgatgtgtttaataattgttccaagcacatcaccaccaaaaatcgttcctaatgaccataaagccgggatgcgatagcccttcaaccataaaacacctgcaataataaatacccatactaaatctaagaccggtttaactaaaaatgaaagtaagctcatcaaagcatgaaaccaaccaattccttccaggcgctgactagtaaataacgactgcagaacagcatcaatcattgttagcactgacgaattaaacataattaatagcatcaatgcgataaagaaaccaccgcttaaggcaaagcgccaccaccgatgatcatcacgttcaataaacataatcaaggattctcctaacttaaattaattaatcaaaaataagtataccacagtgtcaaaaattccatcgtgactttttgattaaatatttatgaagatagttcaaaacacgatttaaaagctctcccaaaccaaagccaagcgtaattgcaccaacaatgacaactacctggtagaaataaacattaacaagatggtaattaccaatagcaaaattacgaaccattttataagcctgtcctccaggcacaaatggaactagcgcgggcacattaaaaacaataattggcattcgttttcgacgagctgctgcctggcttaataccgaaattaagattgcagcaactaaattactaaacgcaaggccaatgccactgcaataatacattatccagtagactacccatacgcctccaccaatcatccccgcagtatgataggcacgtttaggaatatttaagaggataccaaaacaaactgtcgaaacatagcataagaaaaattgtaataataggttaccccaattcatctcctaccctcctaattaaagtgcagaacaattacaattgcactaccaatcgaaacggcagttagaatcgcctcaatccctcttgtaggtccactaattaagtttccggaaactaaatcccgtgccgcattagttaagggcaccccaggaaccagaggcataaccgcaccaataataatatcattaatattattagcaaggtgcattttaacaaagatcaccgccaaaatacctataattaaggaagaacaaaactctcctaaatattgaatcttaaactttcgtaaaaggtatgaaaatgctccgtaacctacgccacctgcaagaaagccagcccaagaatcagaaacattacctgtaaagacaatcattaatgcaccacttaaaatcgcagcagcaaatgattcataccagttttgccatcttgacatcttttggtgatcaatcctttttaatttagcaaatgcttgtggaacatcaattttgcgccgtgctagttcacgagaaacttcattgacatccgcaattttacttaaattgtttttgcgatgacgaatagtaattacttgggcatcaggttcattaatcgtcccaactacaattccagttacggttgtaaaagcctgaaagccatgaagtcctgcactttttgccattcgggataaggtgtcgttaactcgttccatatttgatccattttcaattaaaagtctcccagctagcaaacaagtctttagtgctagtgcttgtcgtcgtttcgttaacatcttttcgccttctctgttcaaagatatttattattatcctctgtttagataaggagctcaatacaaaaaaacggccggaaaaatccagtcgttttttgtatttagtctttaactacatttgcagcttgaaggccacgttcgccttcttcaacttcaaacgtaacatgttgtccttcgctcaatgacttaaagccatccccttgaatagcagaaaaatgaacaaacacgtcatcgccgctttcacgagtaatgaagccataccccttatcgtcattaaaccatttaacagttccttgttccatgttggaaatcctcctgtgcattaagcactaatataatttgtaattcgtctcaggtgaagagatccatttgcaatgaaacaatcgaaccaaccgcacttaaaaaaactacaaaaaccattgtatcacataagcaatcatttacataattaacctttattttcttgagctgtgtccggttcaataaaaatattatgtgaggccttatatgaaacattaatttcttggtcgttatcctctttttgaatcacaattggtccttcaaaaggctcatggcgaattacagttacttgttcctgaggtcgtaatcctaactcttctaagtaagtgagaagttcatgattatctaagaatcgttctagttcaactttttccccatcatcagcatctgctaataaacgatgtgttacatctgggaacttgccattagctgatggaattactccaccatgcggacaatgatcagggtgttgaagaaaagcatctaaggccgttgctagtcgatcacttgtctgatgttcaagaatttccgcttctgaatggacgtcggcaaaattgtagtgaagcttatccactaaaaatgtttcccataaacgatgctttcgaactaattctgcagcatacttttgtcccttttcagttaaagaaataccagcatatggttcatgaacaactagcccttcgtcagccaacttagaaatcatctcggttactgatccagcggcaattcctagtccaagggaaatctctttattagaaacttttttatgactaccacctaattcaaaaataatttttagatagtcttccttcattggagtcaaattgtttcacctctgggtattaaaatttggcctacgatcggtcattatgtgtttttatatattaacattgaacccaaattgattatagcatattattaaaagtgtagtttggaaagcctaacttttttgttataagctttttataaacccgcaatcgatctttacggaggagtaggtaaatcatggacgaaaaagtaacagggaaacgctttttagcagttaccctcctaaatgtattaattacaattgttgaaatcttcggaggtattctttcaggaagtttagccttactatcagatgcttttcataatttaggggattcgctttccattgtactaggctactttgcccagcatattggcgggcaaccagagaatcagcaacgaacttatggctaccgtcgagctgaaatcctctcagcattaactaatagtatttttttaattgttatctctgtctttttaattattgaagctattaagcggttagagcatccccagcatattaacgggggcattatgttaactgtagccgtgattggtctgcttgccaactttatttctgcagccctcttacatgccggaagcgaagacagcttaaatgtcaaagcaacttatctccacattctaagtgatgcactttcatcagttgccgttatcattggaggaatcattcttacctttgttaatgttccatggcttgatcccgccttgacaattggggttgccctctatattgcttatgaggcttggccaattattaatcaaaccattaaaattctcatgcagtcctccccagatcttgattataattccatcgaaaatgatttaaagcaaatcgacggagttgcggcagttcatcacgtccatgcatggatgatggatgaacaccgaatcattttctctgcccatcttaattgtgatgacttgccactaagccaggttgagcgaatctatagtcaagtagaaaaaatcttgcatgaaaaatatgggatctgtcacgttactattcaagcagaatatcaccgtgggaaagatgaaaaattattcaacactcctgttgatgaaaagaacgttattaataacgatttcaaagaggactaaaattaaaaggaagcaaaaagttgagcgaaaactcagcctcttgcttcctatttttttacatcgattaaaataattttccgactccatagtgaatcgtaatcgtaatcaaaccaataataatatttcgaataactgcaatttttacaagcccgttcccgagtttagaactgatataaccggttagagcgctcgtaaaggcaactgccaaaatcacggcataccacttatatgcttcgggagcaaaagtcatcgccatcaacggaattaatcctccggcagctgctgaaaaaagagaagaaaatgcagcatcccaagggttaagatagtgaccaagctcaacatcatacttaatccgaacaactgtctcgaggggctttttattaaggagatccttagcaattttgattgatgtttcaggagtaactcctttatttacataatagtcttttactgccgcaagttccccttcataatcgtcctttaagagttgctcttctttagcaacggccgctttttctgtatccttttgagtagatacagaggcatattcgccagaagccattgaaaatgcacaggcaagcaaatcagataagccagcaatgaagatagtaaaacggtcacttgtcgctgctgccaccgataccaaaacaccgacaacagtcaaaatcccatcatttgaacctagtacccctgctcgtaacgtattcagtttttcttccattgtttgcttctgatgctttttcaccttaatactcatttaatctcatctccctaccgcgcaaataattgtccaatcaggtacgtaacccccattgttaataatccagcagctgcattcctgatcatcgatttaatccggttagattttcctaaaaccgccgcaaaataaccagtaattaacaaggcaattaaaactgcaattgcggttgctaagattcgaacatttacgggagaaacggtaaccgccaccattggtaaaattgaaccagttggaaaggatataaaggaagcaatcgccgcagcatatggacttgtaaactcattgggattaaagccatagcgctcttgaacagctgtccctaaagcatctttttccattaattctttcgtcgcttgtttagctaattgcgaatcaatgtcttgagcttcatatttcttttgaacatagtcaaattcatgctggtattgattctgaagccgctgcttttcactaatcaaagccattttttgtgagtccttttgggtcgaaactgagacgtactcccccatacacattgagatcataccggcaagtgttccggacaaacccgcgattaagatggaacgggcattactcgttgccgctgccaccccgataacaattccggcaattgaaataatcccatcattagcccccatcacacttgcacgcagaacgtttaccttttgtgctagtgacatctttttcttggacacatttatcccttccctctttcagtttagaatcattataacatagagataagtaaaaacaaccaaataatcttcaaatgatattctatcttagaatcattaaaaaatatactttcatgtaaaaagcgatagtcctaatcagaactatcgcaataatcttaaaaattaaattatttattcataagcctgaacagtgtttgtccgaataacaaatactgacgttccagcatgacgagccatgtatgatgcctgagaaccaaccgccttacgattacccttcttaccaattgaaccaacaactaataaatctggctgaaaagcggggataacatgattacaaatccgctcagctggccgctccccacgatcaacaatcgccgtaatcttttctggatcaacgccgtaatcaattgctgcttggacatattcatttacccgttgacgtaattcgtcttcactgctatgaacataatccttatctaagatttgatatacatttacccggtcagtttctagaattgatacaattcctagctctgaaccatcacgtttcgccttatcaaccgcgtatgagaaagcggcacgggcatctggtgcatcgtcaacaccaacgaggatcttcttgaacttctttggctttatttcgaacattagtattctcctccctatgttctacactttaacggtgaagcattactcgctcctcttcgttaaatcatattcttcactccttatgttactacttatctcgattttgtaaataattattttggccttcctaaaataaaagtgatttattaaagaattttataattattttttcaaattcacttctacacaattctcattttgacgacttatagaacaatcgatataataaaagttacttacttcttgataatatcaacgaaatggggttaattatttcatgtcaatgattgaatttcataatgtacaaaaatattatggcaagtttcatgcattaaaagatattaatttaacaatcgatgatggtgaaacagttgttttaattgggccatctggctcgggaaaaagtagtttaatccggaccgttaatggtttagatcctattagagacggtcaattaatcgttaatgggtttgaccttgccgataagaaaaccaatgtaaatttaattcgaaaagatgtcggaatggtctttcaacactttaacttatacaacaataagagtgttatcgaaaacataatgctcgcaccacgaattgtattaaagcgtccggaagaagaaaaccgtgagttagcaatgaaactgcttgataaagttggccttgcaaataaagctgaaagtatgcctgctcagctatctggagggcaaaaacaacgaattgcgattgcccgcagtctggctatgaagcctaaatgcctcctattcgatgaaccaacaagtgctctcgatcctgaaatgattgatgatgttttagacgttatgaaagatatcgctaaaaactccaacatgacaatgttagtagtgacccacgaaatgggctttgcacgggcagttgctgaccgggttatttttatggcagatggtcggatcttagaagacgattcaaccgaaaaattctttggcgaccagccttctacagagcgtgctcgcgaatttatgagtaagatcagtggtcactaaggaggaattataatgaaaaagtattggcgattgattagtcttagcgccctcctctttgttgctctccttactctttctgcctgcggtacctcaattgcaaaaaaagatgttctgaccgaagatatgcgtagtcaacgaattacctggggagttaaagcagatactcgtctctttgggctggaaaatatccggacaggaaagctagaaggatttgaaattgatcttgcaacagctattacaaaaaagatcctcggcccacagggaaaaccaatttttgttcctgtaaccagcggaacccgggtgcccctattaaaaaatggtaatattgatgcgattatggcaaccatgacgatcactcctgagcgagaaaagcaagttgactttacccattcttactttgatgctggtcaatctctcctagttaaaaagggaagtccaatcaaaaacatcagcgatttaaatcgacgaggtgctgtaattcttggggtttctggatcaaattcagttaaaaacgttgcgaagtttgctcctgaagcacgtgtccttcaattatctgactatgctcaagcgatgacggcccttaaatctaaacagggggatgcccttaccactgataatgggattctctatgggatggcagctgaaaacccaggctatgaagttgtcggcggtaactttactaaagaaccttatggaatcgccgttaacaaaaatcaaacacgttttcgcaataaattaaactgggcgttaagagaagttgaaaaggatggaacctacaaccgtcttcttcttaaatggtttggcaatgttaaaggatttaattatcaggagatgaagcgctaatgttaaatttaattataaatgagtggcatccccttttaaccggcctctggaatactattctatgtagccttattgcactaatcgggagccttattattggaaccttttttgcccttctcgagatttcgcagcatcgggttttaaaaatcatcggtcatgtctatgtggaggtctttcgtaatatcccactattggtaattacaatggcttttttcctgattatcccaatgtatgtagtgaaaattaatggatttactgcgggaacaattggcttaactctttatacgtctgcatttattgctgaaactgtgcgtgctggaattaattcaattgatcctggtcaaatggaaggagcccttgccaatggacttacttatggacaagcgatgcgctacattgttttaccacaagcatttcgcgttgttattccaccacttggcaatcaatttatcaatttggttaaaaactcatcggtccttgcctttgtcgctggctttgatcttatgtaccaaggaaatctaattgcaaacgataccttagcaactatgcccacgtatttcattgtcgggatcatgtacctcatcatcacgcttccgttgagttattatatgcgacaccttgaaaagaaattagcctaggagggatgatcaatgcaaaactttattgacgcttattcatggattaatatccgtttcctcctagaaggactttggattacgattgaagtttccgtaatttcaattataatcagttttattttgggaacttttctcggaattattcgttacgctaacatcaaatacttatcagcaattgtaggattcattatcgatattatccgtaatcttcctctcctgctaataattttcttcacctactttggcctccccaatatcggaattaaaccagaaattattcctgccgcaattatggcgctttcaattttcgaatcggcaatggttgctgaaatcgttcgctcagggataaattcgattgattacggtcaaacggaaggggcattagctaatggattaactaagtggcaagcattacgaattattgtcttaccacaagcaattaagaatatgatgccggctctcgttagtcagttcatttcattagttaaggatacatcactagcaacaatcattgtcttgccagagttaatgtaccacgcccagatcatctatggtcaaaacacaaattatattattccgatgttcgttgcgttagcagtcctctactttattgtctgctactcattatcattggttgcacgttatttgcataaacacattgcataagtataaacagaggctgagaaaaaactgttgtttttctcagcctcgttttatatgaatattgttacgatatcgcggaaattaaccacaaggcggttaatttccactcacttatttaatactgaatcataaagtcaaaccgttgatgctctccggtcaagcgattaacatgccgttccatcacttgacgtcgttgtccaaacatcatccaaacggcgattccaataaatactactaattctattcccgtcccaatccaattttgaactgttactttgccagtcatcaacgttgaatcagaagcaataaatgccgtccaatctaataggaagtgcattaccattgctagccataattgaccagtataaacataaacggttgcaaaaaatagtccaatcccagctgcgctaactgcttgtaaaacagtcattgaccattcttgagggccatagttggtaagatgaacaattccgaataaaattgaactcgttgccaatgccaacggaaggcgttgcttaacattgcgccaagcatagaataagatgccaagaatagcaaaacggaataaggtctcttccattaccgcagcctcaaacgccgaaagggtaaaatcccaattagcacggtggagccttggcatttctcccgtatttaaggccataaagataatatcaacaacaactaatccagcaaatatcccccaattaaaatcaccgctccagtgtggttttaatcctggccatgataaatgccacgtccgcataacagttgtcgtaagaataaagaaagcaactgcgccaactgcaccagtcgataatgctaataataagaagtgattatcaaccaagtctgttggtaaggcaatcaatggcgtaaaaaccacctgagctaaccaggcaataaagattagccgttcgatgctccaatgcatgaactcaccaattacgcttgcaaatggtgcaaacataataaagtaataaaaaatcatcattgtcacaacgccccgggatggtaaatgtaatagaacaataatttctcgaaccattacatcccaagcaaacactaaaattatcggctgggcaattacctgcagccatgcattcaactttttaactaacaaggatacattaggtaagagttcaaagactaaaccaattcctaaaataataaccatgatcaataatgctaatgcaacagtctgacgattaaattcgtaattacgaatcatcatcattgccaaaatgaccagggtcgccccaatttgaacccggtaccagatcctaagataatcgtttccggtcatttttcctcatcctctctgggaaatctaaaataattgctaaatatgatcataccaaacaatctccttagttttaagaacaaatcttctttttttagtttaaaccacaaaagaacctgcaggcaaaaaaaccgcaagttcttttatcgtttattttgtgtttccagttgcaactggttgcttctctttactattcttctttttagaatgttgctgagagttccggtgggaatgattattttgtcgttcgtttttatgtgtttgattatttttattgtttggtcgacgatagtgttggttttcggaacgattattaccgttcaaaattgtcaccatcggaataatcactggacgacgaccggtgcgatcatagagtaatttttgtaaacggctgataattgtccggtttaatacccgttgatcaatgtgtttgtgattcttaaatgtattaaggattgcccagaatacttcatgattggctgccttaatcagctcttgtgattcatgcatataaacaaagccacgagaaacaatatcaggccccgcaacaatttgataatcctttaagtcgacaaccgcaatcgctgttacgacaccttcttctgaaagcaagcgtcgttcgcgaatttctggatttccaaccgtatctcccgcatcacgaccatcaatataaacatcactaacactatcaatatggtccgccactcgacaagagtctttcgtaagagctaaaacatccccatttgcaaggacaaagctattttcctttggtacaccagtcatttcagctaacttagtgtgaattttttgcatccggtattcaccgtgaaccggcgcaaagaatttcggcttcatcaagcggagcataaactcttcatcaacttgaccaccgtgcccggatgtatggatattgttaacataaccgtgaataacattagcaccgtcttcttcaagcttattgatcaaggcattaacgctagtcgtgttacccggaattgggttacttgagaaaacaacggtatcctcaggctgaatggtaatctggcggtgagttccgttagcaatccgactaagcgccgccattggttcaccctgcgatccagtacacatgatcaatactttttctggtggatagttattaatttcgttctggtcaatcaatgagtctttagggatattcagataaccgagttcttgaccagccgtaatcgcattctccatactacgaccaaaaacagcaattttacgcccttgagcaatggctgcatcagaagcttcacgtaaacgatagacgttagaagcaaaggatgcgaaaataatccgtcccttgatccgttcaaaaatacgccgaatgtgaatatcaacccatcgttcagacttagtaaattccggtcgttctgcgtttgtactatctgaagtcaatagcagaacaccatcatcgcctagtttggccatttgttgaagatttggaccaggtaaattaccaaccggtgtcaaatcaaacttaaagtccccggtttgaacaattgtcccttgcggagtatgaactgcaatccctaatgtatcaggaattgagtgggttgtccggaagaaactaacccataatttcttaaagtgaacctcatcaaattcattgatttcatgcaattcggcatttcttagtaagtgtttttcttccagttttcctttaattaatgacattgcaaatggtccagcataaataggtgcattgaccttttgtaagaagaatggtaatcctccaatgtggtcttcgtgaccgtgagtaataaagattcccttaatcttatctttattttcaatgaggtaatcataattttgaattacgtaatccactcctagtaattcatcttcggggaataaaactccacagtcaataacaataatttcatcttggaattgtacacaatacatatttttaccaatctcaccaagaccacccatggcgtaaaaggcaacttcattgtttttaatctttaattttgtcataatacctttccttctatagatttttatcatgttaattaacggaatttaagtaagccaaaagaaccgctttgttctgacaaggtcggttattgatattcattttattattggcacttaatcttaattatttaatccgtacgtaaaactaactactattttaccacatctacaaaattgaaggtagtaattgcctaattctttgattaaaaaagaaggtgggagaaagtatttatctttactccaccttcctttttaaatcccactagttgcttgcctaatcttcttctggtaactgttcctctttttgttcccaagccttcatccaatcaacaaccggttccccatcttcatgaaatttaacattagtcaatgcggttaaaattttttgataagctggcttacttagccgcgtgcttacattaactaattcctgatgacccataaaagcattatcgcacaagatttgattaattgtagccattaattcattagatacttgtgagctaaggatctctaaactgcccctacgatattgatcaacataaaaattaataaaggaattaagggcaacttctttagcatcctcgcttaactcactataacttaaacctgttgtagccaattgttattcttcctttctcaaattaatttactttggttatcctctacattttaaccttaacacaaagtttattatccgttaattttccttccgatcccgaatacgaagactagtattttcaccatcaatcactgcatatacttcttttgtggaatcttcagctaatgcacccagcttaacttctccactatcttctccagtttgttctacctctttgataccgtccgtaataaaacgggtaaaaatcttatgaagttcgcgccgtttacgttccttttttacagccatcgctaaagtaaagccttgatccaaaaatactttaatcgttaatacctgaaaaattgttggaaaactaaaatagtgatttttattctgctcatcttgttcagatttaatataaccctttttctcccaatatcttagttgactagtagagacaccagttacacgtgctacttcactcatattaatctttaattgtttactagcgatcatttttctaattttttcagaaagcggatccattatttcctccaaagtgtatatttcaatcataaattaccaaaaattcgatatctttgtcaaataatttgacaaagatatcgaatagtattatatttttcacattgttaaaaacgtagaggaggattctattagtgaatcaagagcaacaacctgttgatattaatggtcaaacttataatcgttccttaatgatcttcgtcctattaattggagctttttgtaccattttaaaccaaactattctttcaacagcctttcccgcattaatggatgcttttaatattagtactgccaccgttcagtggttaactactggtttcttaatggttaatgggattatgatccccgtaagtgcctatttaaccagtcgttttaatactaagagtctttttatcattgctatgtcaacctttgaagttgggacaatcttagcatggattgctccatcgtttgccgttttattagccggtcgtcttatccaagcggtcggagtaggaattaacatgcccctaatgcagaatattatgctgactgtttatcctcctgagaaacgtggcgctgcgatgggagtaaacggcctagttattggattagccccagcaatcgggcctgctctatctggatgggttatcgatagttatagctggcggtggcttttcggaatgatcgcccccattactgctttagttatcattgttagtttttttgcagttaaaaatgttattcctaataaaaagccgcatcttgactggctttctgttgttatttcaacattaggatttgggagcatgctttacggattctcaagtgtcggtgataaggggtggacagatccggttgtcctttcaaccattatcattggggtgattttagttggaattctaatcatgcgtcaaaacaagctagacgatccgttccttgaattcaaggtatttgaaagcaaagaattctcccttgcgaccattcttagttcaattgtaatgatggcaatggttggggtagaattcgtcatccctctttaccttcaaatcattcatggaatgtccgccttccattcaggtcttacccttttatttggagcccttttcatgggaattatgagtccaattactgggaacttatttgaccgtcatggtgctaaacgcttagcctttacgggaatgtttatcttaactgttggaacaattccttttgcctttattactcgtgataccccaactatttatattgtcttcttatatgcagtccggatgtttggtatttcaatggtaatgatgccagttactacagcgggaatgaattctcttccttacaatctaatttcgcacggtacagctgttaacaataccattcgtcaagtcgctacttctgtgggaacagcgatcatgatctctgttttgacaaatattaccaatagcaatcgacctgctcattcactgctgacacaatccccattacaatataaagcaaagatgtttgatgctactttgatggggtaccatgcagcattctggtttgcaatcgccttctcactcattggtttattccttacattctttgttacaagtggtaatggaattcacctccgccttgatagcgaagacattgcagaaccaactgataaaggagggatgaagtaatggttattattttaacttttctaggagcactcgccttttttgcttgcatgatgtttattcggcaaaaaagcctgcgaattattttagctacactcacgggaattatctttgtgggctcaactcttttgatgacactaaattacagtcaccattttggaatgcaaaaagttacgacaacaaccaccaagcggatttactctgcttcaaattcctcaatgcccctggcaatttatcaaccggttggtaaaagcggccgcgatgatgtttatatttataacaccaaagttaaacaaaaaacgccttaccatacccaagcaaacgaatacaccactagtcgaattaaatggactaatggttctacccctcagctcgtaacaactgagacgcgctggcaatatcgtaataatttttataaagtcctatatgcatggtcaggaatgaacaatgcattagttaagcgaactaacgtgttagaatatccacgaatgtatgttaaactcacaacgagtcaggcagataaacttgccagagttgctaaatctgctacgggtgccaaattacaagcacaagcagcagaacaaggacgcgcttttgttacatcaaaggttcaagcagcaatggctaagaatcctaacatgactgctaaacaaattcaagaagtatcagcacaagcagaacaagaatttcaggcccaaagcgttcaacaaattttaaaacaagttaagtaaaaaatagagactaagagaaaaagcaatctctcctagtctctattttatatttaatctaattcaaaaatactggtggcaattctgaggtaaatgtcctttgtttaagggtaaagggatcgttaaaactaattttacttgcatgaagcaactgatgatcatacttactagtatcgccgccataaagatggtcaccaattaggggatgaccaatagcagcaaagtgaaccctgatctggtgtgtgcgtccagtgtgaagtcttacccgtactcgtgtccattttgcgcctcgttcttcaacccaatactcggtcaaagctcgttgcccattctcgtcaattacccgtgcagcctgcccatcctttcttccaatcggcttgttaatctcgccatgctcgtccataacctgtccttctactaaagcggtatattccttcagcatttgatgttgctgcacttgctgactgatcatactggaagcgatatgatgcttagcgataagaagtaatccccccgtaaagcgatccagtcgtgtaattaaatgagggcggagatctgcagaattatttgcgattaagtatccctttacccgatttaaaaccgtatcattttgaacggttggtcctgggatagaagtcacccctgctggcttatctactaccaaccaattatcatcttcataaacaacatttaagggctcattactactttcaacagtatcatcagctaattctggttgagccttaatggttaaaggttgattaggaagaatctgggttgttggccgtaccttccgatgatcaacaaggaattccccttcaccgtttttaagatcgttaaataaacgatgccccatccccaatgactgaagatacttctttattttaatcggttcggttcctcggtatatccacgtattttccatcttaatttcctccatcaacattgaaaaagatacaaaaaaagagctgatgacctaaatcacagctccttaatattgaacggtccgtacgagactcgaactcgtgatctcatccgtgacagggatgcgtcctaaaccaactagaccaacggaccaacttgacaacaaataaaagtatacgagatttatcgaaattagtcaacaaaaatttgtgatttatttttgatttttcgtttttcctatctataccgtaaaaattatcaatagtttataatgaaagtactagctattattaaggaggagtttttaatgcagcagttgggcaagcgcctattaaactggtggtctaagtattcaaaaatcataaaagtagtgtttgtaacctcagtcctagtctttgttattctcgcgttaggtaacttttttaaaacagttaaatggcatgaagtaggagttggtttagcaaacctgtcttgggaaagtatcatcctgctactaattacgggatgcatcgcagtcatccctatgttggggtatgattttgcaatcactcatttattacccgggaaatttaagaaatcatatattatccgctgtggatggattactaatactttaacaaatattgccggatttggcggaattcttggttctactttacgagcatacttctatcgaaagaacgcaactaagaaagagattctacttgctatctctaaaatcgctgttttcttactctctggtttatctgttctttgttgggtagctttgatcatcatgtttgtgtttcacgatggcggccacttcaaccaatacgcactttggcttgtggggggcggattatattttccaatcgttttttattttactgttattcataatagtaaaatatttaagaatatcacgcccaaagtagggacctttttagtcaccagttcaacttgtgaatggctatttgtagcactttttttcttactagtcggttggtgcttaggcgttcggcatagccttattagcgttctgccattatacgttgttgcccaagttctcggggttctttcaatgattccgggggcacttggttcgtttgaccttttaatgatgttagaactgtcattacttggcgtttcccaaactacctctgttatttggttattactattccgaattttttactacatcgttcccttaattattgccggattcatgttcttgcactctcttgcatcccaagttaaccagtttttcgacggattaccattgctaatggtccgcaaacttgcttactatttaattacaacgtttatgtatgtttctgggattctgatgcttattactgcctcaattccagacatcacagcacaaaataagattatcgcgaacctttatccctataccttcttcttcctccaccaattgacaaccatcttatttgcactggctatgcttgcctgtgctcgcggtcttcaatcaaaggtgaaaaaggcataccttcctactttaatattattggtaattggaattgctaataccatttggaacctgggaacattgagcttaacaatttacctcgtcattgttttgatacttgttttactctctcgccatgtgttataccggaagaaattggaatattcaattggaaaattcgcaattgatagtcttatctttgctggagcatgtatcctctatgtaattgtcggggttattaatgctcctcaatattccagtaagcaccacatccctgattttctatttttccctggtgaaaagatttggatttccggacttttcggattaatcctcggcctcttattaattttcgttattctgcgctactttatggccgggactgatcctttcaatattccaaacgtatttgatgctgaacggatccgcaatgttattaaagaatatggaggaaatgaaactagtcacctcgccttcttaaaagataaaagtatctattattacagtgttgacgatcatgataagctctttttcatgtatcgccgtaaatatgatcgcttggtcgtaatgggcgatccagttggagataaggatagttggcgaccagctcttcgacaatttgtcttagaagctgataagtatggctatcagcttgtcttttatgaagtctccagcgatatgacaatgcttcttcatgaatttggcttcgactttattaaaaccggtgaaactggccttgttaagctggcagactttacgcttgctggtaagcgacaacgatcacaacgagcattgatgcataaatttgatcgtgaaggctataccttctctgttgaaaagccaccatttagtaaagaattaatgcaagagatgaaacaagtctccgatagctggttaggaaacgaaacagaaaaaggattctctctcggtttctttgactcctactacattaatcaagcacctgttggcattatccgtgataaagacggcaaaatggtcgcctttgcaacgtttatgccgacagggggtaaaaagattttaacaattgacctcatgcgtcatagtaaagatgccccttctggaatcatggataaaattttcattagtatgttccagtacgggcaggaaaacggttatacctactttgatctcggaatggcacctctttcgaatgttggcgaatatcaatttagctttattgaagaaaaagctgcacacttcatctatgaatatggatatcatttgtatggctttcaaggattacggcgatacaaagataaatatgcgacagtttggtattcacgttatactgccttccgcaagaagaattcaatcattgccacaatgatgattctagttagtgtcgttaaccaacgtgttgatcagcaaaaccaccgttcaatcttctggtggttgattaaataatcgagtaggagataattgattagttcaattatcgacctctcacaccaccgtacgtacggttccgtatacggcggttcgacaacttaatcacattgaattgactggagcgtcttggacatattcataagtccgagttgttccagttttctattagttagagaatagctcaaggtcttactgtgtgcagttcgccagtagcccttgcgggtactagcgaagacatatgcatcacgctgggacagccccagcttctgtaagttagttaccttagttttaagcttcttccattgcttccagatatactgtcttattcggaccctcaaccacttgtcaaggcgttgaataaagtcagttagttttccaattgagtagtactgaagccatccacgcatttttcgctgaatttcttcaaacattcttgtcagggatattccacgattacgtttagttaataacctcaatgctttctttactcgttgttgcgattgtttagctggacgggcgtaggctccattgtggtctacacccaacgaaaagccaagaaactttaaccgtagcgggctaccgactttggttttatctgggttcactttaactttcaatcgcttttcaagaaactgggtaatgcttcgcattactcgttctccggctcgttgacttttaacataaatgttacaatcatccgcatagcgcacaaagtggtgaccacgtctagtcaactctttgtccaactcatttagatagatgttcgccagtagtggtgacaatggccctccttgtggggttccttttccactcttagcgaaaagcccatggtctaagactccgctagttagaaacttacgaatgagtcttagtgtccatgggtcatcaatatattgttggagatacttaatcatcaagtcatgattaacgttatcaaaataggcttttaggtctaagtcgacaactcttcgataaccttgattataaagatctactacttttgcaatagcgtcgtgagccccacggtgagggcggaagccaaaactattatcagagaaaacacgctcaaagataggtgtaagaatttgggccacagcttgttgaaccattcggtccaccactgttggtattccgagttttcttactccaccattaggcttcggaatttctacccgtttgactggtgctggtttatacttgccctcacgcaaactagcgatcaactccgtcttattttctctgagatatggcagaaggtcattgactgtcatatcgtcaatgcctgctgcccctttatttctcttaactcgcaaataagcctgattaaggttattgcggtccaagactaagtcttggatagtgacactcatacctttaccttcaccataatcggtactacgcgcccttgtgtactttcggttttccaaacctatcctcgacaagcggtcagcttgttgttctgttttctgcgattgtcgcacctgattacacctccgatataagttacaagttattgtcgttcagtccttcatctgattactcagactactatgacctcggctgacttctggcttactcaacgctacatcactgcaccgcttgtttctgtggaaattaaacttattcctcttgtcggaaacgtgtaggccagatctccccgggtaaggatattaactttcgtaccatgtcaccggtagctttactgaaagtaacttcgagtagtgttggactttaacttgtcatgcagtcttatccagttagttccagccttatagctacttcttgttcatcggtgcagtactttgccttagacttccttcagattccacctcacagtggacacccttgtcctcagctcatggttccgactactacggcccatagcggactctcaccgcctagctaatacccatgccgggcgcacatgttaagagggtgaggaaaaacttttccgtttttcctcaccctctttacttttatcgcctatttttgatccattaaataatcatatagcatctcatgcttaatcttatcagtgttgtatcctaatacctctgcaatctgataagcaaaggctaaggcagttgcaggtccacgactggtaatgatttttccatcattatcaacaaccgtaatatcctctttaaaatttgctgttggggcaaccttagcaatttcctcgttaattcccgggaagcaagtatagttatgattatcaagcaacccataccgagccaaggcaatcggagcagcacacattgcggcatcccacttattttctgcattgcgtttttgcatcaatttcatcaacttatcattatcgcgaagcttttgggcacccccgcgaccaccaggaaaggccaccacatcataattgaggagccgatcactcattacctcatcacaagttaattcaattccatgagcgccaggaacatgaagatcctctaatccgaccattgtggtttcaatcctcattcgccggagaacgtccacaattgtaagtccttcaacttcttcacaacctggtgcaaacactacagcaactttagccaaaatatcaccccatcaattattaattgttgcaactacccgtttcattacaccctttgcttctggaatttgataaagcgggtaaatatgaaacagtccacgaccagtatatgagtttacagtgatcccagcgttacgcaatttttgaacaaacaaggtcacatcaggatatagtatttcccttgtccctacaaaaacagtcacatcgcgcaactgatcaagattcccatataagggacttaagcgatagtcttgatgatctgtatcaccggcccacatcgtaccaatttttcgtaaaccgttcactgctagtgtaacatctttatcctcatatttgctaatgaggggatttgtgaggtcaaggtcaagccaaggagaaaatagaatgaggtgaccaggctgtggaagcccctttttaccaagatattcacaaaagccagctgctaatcctccgccagctgaatcgcccataatagttactttactagcaggcataagggtataaattttactataaagactagcaatttcttgataggcggtacggaaagtagcatgcggaactaacgaataaatcgggacataaatcttcgcatccgtggcgattgccaaccgatttaaatattgccaatgagtcttatcgggacgctgaatataggctcccccggttagatacatgattactcgttgattatctccgtgatcatttaagacatatgttgttacttcctgttcttgacgctgaacatcaaccgtcatctcagcagcaggtaagtagtaatcagcttcattgtcaatccatgcattacccactaaggcattaaatttattattttctgcaagatcatttttaaacccgcttaattgaattcccatttcagtaaaggttgctttactagaacgatgagcaccacatcgccgtaactctcgcaaactattctcaagattattagccaaatgactagcaatttgagtattaaatttttttattttctccactgaaacgatcgctcctcatttaaaatcttactattatcctatcatgatttaagattttgtgtctttaagattacctaaagccattagctcgcgttgatgacaatggttttgccagcctaaaactacaactaaaattaaggcaataacgattaaaattactgccgcaatgataatgtcgcgatacccattataaagaatcatacgcagggttggtaaaagcttatctggaagactactagcagtttgggcatttgataatttatttagcattcttaaggtaattccgtggtgcgtttgaacaccctggaatagctcttggttaagaataactccatacaccgcggacataagggtctgactcaaaattcgcaataagtatcctagcgaagtagcaattggtacatcccgtaattcagcatctgtttgaacattaatctgtaaaatattaaagacaagaccaacaccgaatccttcaaaagcacccatgaataaaataagccagaatggtgttttttgccccccaatcattattcctaaataagcaataaaaattgaggctgccccacaggtaacaatccagtattttccccatcgctcctgcaataccggtactaattctgaaccaataaagttagtaaccgcacctggaatttgcgtcattccgccaagcagcgcacttaaacctaaaattccctgagcccacattggaatataagtgacaaatgcaataaatgaaccccagattataacgaataaagtaaaatcaattaccaattcgcgatttttaaacagacggctaggaacgattgggtcgaccgccttactgtcaacttttatcattccgccaagcaataagagaccaacaactaataaacagcccactactaagccagaagctgaaccaatcaattgaacagctactaaaattattactaaactgactaccagtaaagttgctccaagataatcaactggcttacctgcagcttgctttttcacattcttatagaacaagctaatgatcgtaatcgcaattaaggcaatcggtacattaacatagaaaacccagtgccaactcaacgcgtcaacaatccatccaccgagtagaggaccaataatcgaagcagttccaaaacaagcactggcaattcctaatacttgggctcgtttttttaggttgtcgtacaattcagcaaaaacgataaacgggattgtattcattccgccagcaccaattcccattacagttcgcgcaataataaaccataaaatattaggggctaatccttgaaagatggctccgactaaaaacatggaggtagcagtaatataggcttgcttatttcccttatgctcaccaaacttactccataatggggttgcaacagccattcccaaaagaaaagttgcgatgatccaccccatatattgcaacccatgaaggtcactggtaatagctggcaaggccgtatttacaatcgtaccatccatccccgccatgatgttagatagtaacaacgcaccagtaacaattgttcgtcgttgttgtaattccactttttcatctcccttaattctctacgtactaaagaggatggaacagagcatcaaagtgcgttgtcccatcctcttgaattacaaactgtttcccattatacgacctttgtcacaaaaagtataatggttattttttcattttcttaatgtcctgccctaactgttgccagtcagctttaatagtaggctccaatcggcgggcatagagtactgcggccggatgatacatcggcataatccaatgcttatcagtcgtcaactcataaccatcatgcgcatcattagtccgttgaatcttttcgtggagaagttgcccatgaagcttaccaatattggcctgactaccaagcagccgttgtaaagccgtattgccaagcgtaacaataattttcggcttaacttgagccagttcccaatcaaacaaaggagcaaatgctaagacttcttttttagttggcgtccggttaggccgtttttcaattacttcacctgtcttcttatcaattgccttcttaatactataaggccgttgacgaactacactagtaatataaacggttgaacgcgagtatccaattgattcaatcaatttcatcagttcctgaccggaagcaccagaaaaaggaatatttaccttttcttcgtaacgaccaggagcctctcctactaacatcaaatctggattaagcggtccttgacctggagtaaaacctgttaattgccgatccttcgtttttccttttacctctgccagtagcgttggcggatattctgcaatcatgttcgtaatctcctatccattatgtcgccacttagaatctgtaagaatacgagcagcgatcaatcccattggcaagaatacaacaatcataagcgccttggtcatccaaagcgttcctacactaatcgaagttaaaccgatattatacattgcccgatacatatagagtcccgggaccataataacaatcgacggaaccgtgattgaaatttgtggatattggattttacgtttaacaatcgatgccaataacccggcaactaacgcccctaaaaatgcggctgcccctgccggtattccggtcaagtccgttaattctaagcgtaaagtattagcaatcgccccaatacaaccggcaatagccgccattttaggcgtactgttaaacattattgagaagccaaacaccccacaaaagctggctggcaaccggagtaaaaagagcattaatgcagatagcggcaatgcttgaaaattctcaggacgcaggttaaccattaatgctacaatccacccgaccaaggtagcaactgtaataattgcgattgcataggtcatccgttcaagcccggaccgcatatcaagttttgaaatatcaaggccactagtaataaatggaaatcctggaataataaacagcattgcgccgatataccctgcttcatgacgcgaactcacattaaacgttaattgcatcaaacttaaagccaacaggtaagaaaggcacgcaactgcaaccgcaaccgctactcccgcaaataaggtaatgtgatggtcaatcatcttacgacggacatagtttccgaggccagccccgataaaactacaaaacatttcaactggtccaccaccgagtaaaaagacgaaggcgctacatgccagagcggctgctaatcctacttggtaaggagcgtaattcccttttgagtgggcaatttcctccaaacgggagtgaatttctccaattgtcatctcactcccatgctggtcaaattctttaataaatcgttccatctgcgaaagttttgtcgtatttacacttgtgcttggcaaagatattgcctgcgtatagctatgatgggcatccatacaggtatactcgagggaaactaacccaatatcgaccgaacaagtcatttttagcgtccgggcaactgtattcattgaatcacggactcgccatgcccctgttccataagaaagcatcattaatccaattcgcccgacaatcgctgctcgttctactaaattagcctcatacgcaggggtgaaattatcatttgtaaaaaagtcatgccatggaatcgccatatgatgcttatcagacaaatgttcagtcggctcaaaatcattcgctgagatctctttatccttactcaaaacccatcaagctcctcttatcaattctcttaactatttaattatacggcgactgtcaagcgacgggagtaatttcttttaatttagtgattagttgctgctcatcatcgcttaaaatgtaatcctcccgtgtagcaagcgaaataaaaaatttttccggaattgggtctttaatatcgagggcgacaattcctggttcatcctttaccgcatctttaaccatcaaactaattcccttattttgccgtaccaactctttaatccaggaaacatttggcaccttataaattgccgtttgtggattaatttgggcataggtagaataggtctgaaaggcagctttatgcacatattgttggtcataattaataaagatttcgttagttaagtcttgaaaactaaccgcctttttctttgcaagcggatgatcagcacttacgatgatactaaatggtcgcgtagttattaattccgcaaaaatacctgcttgatcaattggtgcaattgagcccaacattgcaatatcgatctttcccgcttgtaattcacttagcaattcatgagatcccacagaaacgatttttattcgttggagaagctgcttagaaagattgccaataatgtgtgaaatatacatttttccaatgattggcggaagaccgaattttatttggcgttgatcggaccgtgctatttcttgatgagcaatgtctatttttttgtttatcgccaacgctttttcatataataactgcccactgcgcgtaatcatttcatccctatgaacacgatctttgcgcactaattttgtgtcaaattcttgctcaaggcgacgaattgcctgggtaatactaggttgagaaacattaaaatactttgctacttgcgtataattttttaatttaactagcatggcaaagtattgtaaatcacgagtattcatcgtcttaaccctttctatgtcgaaataatatctttatcttacgtcaatttatacttgaatacaaaagaatgttcgcaaaagaaatcaatcttttcaacaagacggtcggctaaactatcttcatgttatcttgttatttaaaataataaggctgggggaatttttcatttctcccagcttccgcactaatcttaagctattcaagtaaatattaaattattgatgttcttttaagtaattgtccattattttattaaatttgtttgcctgttctgccattattacatgaccactttgatcaacagcttgatgcgagataaactgtggattagcttgtctcataacatccgcaaatttaccattaaaatatggactttgatttgcggtaactaataatgttggaatattaattttttcaagtgttaatcgccaatcccgtttagcgtgatcatagagtaagggaagattttcggccctaataaatggaaacatttctttttctggctctaattttgatattacttgagatggtaccccatttaatgtctctctaacattaccatgctctttcaattttaatttatacgatgcccttgtgatatccatatatccataaggccattgaaccgtattaaacatctttggagattgatcaattgctattacaccacttaacggaaaatcagtataatatgataaaaatccatatattacagatgctcccatagaatgccctattagaaaaggttttgttacattcaaatgatttaatagttcatacaaatcctttattaaaggctcaatagaatctaactgctcatctctagttgatgctccatgatttcgctgatcatacgtaattacttgataaccttgctgaattaagtttttaatttgtaaacaccatatttgttgatagccgccaaagccatgaattaaaacaactggtttcccagtaccataaacatagtaattaattcttatcccatcacttgttttgaagtccatcaggtaaaccttccttcactaaagctaaaaagatagtaactattaataaatcagcagtacctccaaggcttaaattttgctgagtaaatttttcttcaatttcagttaatttttgttgcccagctttagtccttattccaccaagatttaaacactctttaatttctttatttttccattcttgaatagccggatcccccgctcttttaattaaggtcgaatcttcaatatgtaaagctaattctaaaaaagttattaaaattcgactattccaatcatagtttgatgttaataaggtcggtaacccatacttaaaaaccgtcgggtatccagcgtgtgcttctcctcgaataccagaaaggccgtattttaaatattgtttctcacccgcagttagaatttttttcgatgaaagatgttttagatcatcattaatcaaattttttaacatctttttaatcacgtttttaatatcatttgcatcaaatcgttttagatgctgtaagctgtaggctgttgctgtaacaaatactcccaatgaaaaaactgctcctttatgagtattaacattatttgtagcaacaaacattgttttctcagcttttttaccatattcacgtaacttttcaaatatcaatgataaattagcagaacgactcattattcccagtaatgctgcttgatgaagatagttacgcaaactaatagaactattaataaacgtaaatatgtccatatctaagtgtgctccatgttcaactggatccactaatccgggcttaggccaagcagatacttcatataaaagagctcgctgtgcaagttgagttaaccaatttgcaatgttttctttttcttgatataccaattctacgcaaactagctgactaactttttcttgtaactcttcaaccgaatgtcgacgggagcgaccacattctttagctgggcgaccacaaattaaacactttctagcaggttgatttacatctgaccttgatagtgattttattgttccactatcattagccagcacatctaagtcaaataaacgataacttggcttcaattcttcaaaatgacttgtaatctcttttactaaaattgctcctgtatcaacaagatagaagcgttctggaccggttttcttatccagccactctttttttgaaataaaaacaattccagcatctaataacattttttcaaattcattgagaccagctataaaaaatgactctatctttttattattctttattggaccaggaatatttaatttagctgctacaacagtcattgatggattagttttcaataactggttttgtatttttacacgctcatccttattttttaaaacggcaagaatgtcttggtattcaccgtgatcaaaaatagtttgcatactaactcctcaaatcaaactttaacattaattatagcaataatgggtataaaaaacggtactagaaaattccagtaccgcaatttctattcgtaattagtccttaatttgtttaatttcatcaattaaagtaccatcacgatattcaacaagtgcaactgttcgatcagtatattcaatcttttctggcttaccaacaatcttttctgcacgttgttgtaattcttcaattgaaatcaatggaatacttggcacattcttgaatgcttcaattaaatctttacgtgcaggatttacagcaacccctacttcagtaacaacaacatcaattgatgaacctggggtagttactgaattaacagctggtacaattgttgcaatccgaccacgagttaatggtgcagaaataattgtcatctttgcagtaccagcatcttggtgtccaccaacagcaccacgaatttcaccattagatccagttaaaacattaacattgaaatcagtatcgatttccaaagcagaaagaattgcaatgtccagttgatcaaccattgctcccttgttatcaggatcagcataccatgatccgtcaatttcaatttgaccaggattactcttcatacttgaagcagcacccttgtcaaaatcttgaacatccataactttctttactaatccctcttctaaaagtttaacgattggcgaagtagttcccccacaagtaaaggaagcagtaatgttgttatcaatcattgcttgacgaaggaaacgggtaacagctaaagcagctccaccagtaccagtttggaatgagaaaccttctttaaagtatggagaatttacaattacatcattaaccatctttgcaatcttcaattctttaggatccttagtgaaacgtgttgcaccactaccaatacggtctggatccccaactttatcaacttttacaacgtaatctacttgtgtttgttggattgatgcaggcgtattaggataatcagcaattgtatctgttacaagaacaactttatctgcgtacttggcatcaactaatgcataacctaatgatcccaaagctgattcaccattcataccattagcatttcccattcgatctgagttaggaacaccaataaaggccacatcaattttaatgtttccattttcaattgaacgtgcacgattaccatgtgaacggaaaataaccggattctttaataaaccgtgagaaacggcttctccaagacttccacgcataccagaactagtaatgttagtaattgtaccagccttaatagcttcgattaccttatcattcattaccccagttaacgatgatggagccaaggttaagtctttgtaacccatcttgatgattttatccataaccatgttaaatacaaagtcaccattacggaagtggtggtggaacgaaattgtcatcccgtccttcaagttattcttgataacatcatctaatgaatctactaacttatcgtcacccttggtaacacgaacatcatgaccagtatagtgaacaattggatgaccaatttcagtagtttcaaatggcttgtagtttgttgaatctaaaattttatctgaaatttcgcgtccgactttatttttcaatgtattcgccctcctcattgatcaagttagaagcctttgctaaacgaattacccgttgtgcacgtaatacaactgggcggtcaaccatttgaccgttcattgagataacacctgaacccttttggtgtgcttcttcaattgcagcttcaacgtccaatgcattttcaatttctttcttggttggttcataaatcttatttacccaatcaatttgacgagggttaacaagagatttaccgtcaaatcctaattcgtgaatgtgttcagtctcacgtttaaagccttctacatcattcatattagtaaagacagtatcaaaggctgcaatgccagcggcacgtgctgcgtgaagaatcatgttacgagcaaattcgagttctgctccatctgggtaacgatgagtcttcatatcagtcgtatagtcttcagcagaaagtgccaaaccaatcatccggtcagtacttgcagcaatttctggtgcattaagtactcccttagcactttcaatagctgccataacatgcgttgttcctggcttaataccaaatttgttttcagcttcttctactacttttacaagatctagcatcatttgagctgattctacttttggcaaacgaacaacttgaataccagcttttaccattgcgaaaacatcattcttaaaaaatggtgtatcaattccattaacacgaacaactaattctgaatcaccataatcttgtgtttgaagagcttgataaactaacatccgggcagcatctttttctgccattgaaaccgaatcttccaagtcaaacataatggagtcggcaccataaataccagcatcctttaccattccggcattgttacctggaacaaacatcattgtccgacgtaaacgttcttccattattaaaatacctcccagtctggttgatctgctgtatcaagagcacgttgagcagcagccattgtccgtgctttaattacacaatctaaagctcctttatccacagctttaacattggcattatcaattccataagcagttaaagtatcagtaatcaccttacgaatttgattaccataaagttcttccacagaggaatctaagtcaatgttgataccattattaccttggctcaaagtaatttgaatatcggaagattccaaagttcctgctaatgcagtcttcttaatatccattatttaatacttccttcctttatccgagtttgaagctcagaccagttgtttttaataaattcgagcgttgtatctggaacatacttttttactaactcaatattatcattagcaattgctgctcgtaccttcgttgctgaaataatatcctgatccttgtttttctttcgatcaataatctttacttcaacatcaggtggtagaaccctatttaactcttcattatatatatttgttgttttggaatatggttcattcccaagatatcgagatgttatattaagtggttttgcaatttgttccttaaaaagggttgcatccaaggaagcttgaaatcttccaacattttgatcatcttttaaaaagtatgctggaaacgtagcataactaaccatgtattccttacctggtactactataacatttggtaaatcagccactccagctttaactaatttaaagcgttcagaaaatgaaaaaatagaaacatcttcactaacaacgaaaacatacacatgatcattttctttactagcagtttcaactaggtaacgatgtccgtttgtaaaaggattggcattcataactattcctgcaatcttactttccttttgatcattaaagttcggtaaagaagaaatatagtcatgaatatcaggagtaccactttctaatacagttccttgttttacttttgctaattcatgaaatccaacatactggaaactttgactatattgtggtttcgtaaaaacaaacaaatgaaagcgccccatcattgcagcttcgttttctaatttactaaccaaactgttaaatgtttcaccatgtccctgaacttttgaacaaattgcaatatacttcaatacattaccagcaattgatccagttgctaaaatctcaccattttcttcccatacaaaagtcttatcaatagaagatgtttctttttcagaaaaaacttcaattccattgaaccgcaagaacttttgccacttggtcaaattgcgttttaaatgaatgttaatttcacgaacttccattaatattctcctaatcgttattcttttgacttgcataatgttgaacagctttagctactgtatttactacaccatcatcaaatactccaggaacaattttttcagctgttggattagaaatcatatttgctaatgcagaagcaattgctttttcaaggccgaaatcgactttatttaaatcagctgataataatcctttatataacccgggaaataccaaaatattatttacttgatttgggtattgacttgagccagttgccattactgctgcatctgcatcttttgcaatttgaggatcaatctcaggctttggatttgcaagtgcaaaaataattggattcttagccattgtctttacttgttcacttgttaaaacatctgcatcagaaagaccgataaaaacatcccgatcctttaccgcttcacttaaattcttataaggagtttgatcagcactttgttttactaaatctgtttgataatgattataattttgactatcaacatgcactggtccatcaatatcaacaaatgtaatatttttaatacctgccgcaaaaagtaatcgagctgttgcaactcctgacgctccaactccattaattatgactttcaaatctttcagatttttctttactactctagcagcattaattaatccagccaaaacaacaattgctgttccttcttgatcatcatgataaactggaatattaactactttagacaatttctcttcgatttcaaaacaacgaggtgctttaatatcttctaaatgaaaacccgcaaaagattcctgcatattctttaatgttgctacaaattcattaacaggaacttgctcaacagttaaaggtagtgcattaacattagccaaatccttataaagtaatgctttcccctcaacaactggaagaccaccggctgggccaatgtttcctaatcccaaaacagcagagccatctgttactaatgctacaagttttccactaagagtatatttatcctttagttcgggataacgttctataagcttagagattatcgcaactcctggagtatacgcttcacctaattcttttcgatttttcacttcaaattgaggtgcaatattaagtactccttggttcttagcatgcattgagagtatttctttatcttccatttatcgaaagcctcctcatttcattattaatatcttaccacctttttaaaaaaattaaaataattactgtattttttaaatatttaaaaaataatgatatacttaaaacaacattgagcatgaaaggaataaaaataatgaactcacagcatcaacaattactcggtaaccttgcacaagattattaccttagcaaaatggcaattagtgatatttctaaaaaatataatcttagtcgctacctcattatgaaataccttgatgaagcattttcaagcgggattgttgatataagcattcatacagattatgaccgaaatgcccaactagaacgcgaattatcaaatagttttgatataaaaaatgtctatgttattaaagatccaagcaaccccttggaccgcgataaaatcattgctaactttgcagctaatcagatccaatctcttattaaagaatataaaataatcggattatcgtggggggaaacaatttatactattcttgatcatttcagcaaacactcttcccgcaatttagttttcacacaatttatgggtgaaaatatgaaatataaatcttctgccgcatcaatgcgaatggtacaaaaagctgcatccaaatatgattgtccttattacaccattcccggaccactttatattcttaatgacgaagcaagaaatgacctatattccgaaccggcttttacagaagcatttaaggttgccaataaaatggaaatgattgtttgtggattaggcactctccaatcaatagacagtatccctgcttggcatgattataaaaagaggttatttaaaggagttagtttaaaccaaattgctggaatggcatttggtcgtccatatgatattaacggtaactttctaattcatcccactaacgataaaactctctctatccctttaaataaaattcttaacgttcctatacgctttgctattgttcaacgcaaatcaaaatatcaagccgctttaggagcccttcgtggaggtttatttactgatatgatacttacagaatcaatcgctttacgaattattgaagagttaagataaaataaaaatccgaattcccgttacgagaattcggattttttatttacttcttctaccaaatgccaattaggcgcatccagaaggttccaataataccgtaaacaagtaagtagaagatacctaatataaagttcatcttccaccattcgctctgagtaacgtaaccagatgatgataaaatcgaagctggtccgttagcatagtgagtagtagaacccatgatagcagaagtgaaggcaaggagcattgcagttaacattgctggtgctccagcagcaatcgctacagaaacgaaagccgtgtacattgcagtaacgtgagcagtagcactggcaaagaaatagtgagcgtagaagtagacaactactaatacaactaatacccaaatccagctaactccgtgaagggcaccttcaatactgttagagaaccatttaatgaagcctaacttagtcaattcactagccatgaatactaagattgaaagccaaatcaatacattccaagcaccagattcgttcaagacgtccttagtttccaacacgccagtaataagcagaagagcaattgctaagaaagccacaaaagtcgcgttaatagcaggaataaaactagtcaacatccataaaacaagagtcaataagaaaataagccccatgagcttttcagaaagcttcatgctacccatcttttcaagttcgctattagcccaagtcttagcgtttggtgtttctttgatttctggtgggtacatcttgtagataatgtatggcacagcaattaaacaaagtacactaggaagaactccggctacaaaccatccaacccaagtaatattaatgtttaatgtcttagctaaggcaactacaaccaagtttggtgccatagccgtcatgaaggttgcggaagtaatcaaattactgtggaattcagtgaaaactaggaaagaacctatctttttccgagtacctttctttgggtcagacccataagtttcagctaaggacttaataattggataaactaccccaccagcccgggcagtattacttggaatggctggtgaagtaaccaaatcaattcccataatggagtatgctaaccccaaactatgttgcccaaaactacgaacaaagaccaaagcaattcgccgacctaatcccgttttaataaaaccacgggaaagtaggaaggccattgcaatcagccatgatgacgaattttcaaaggcctttaatgcctcttccatcggtacaatgccaaccaagaccataattgtgaacccaactaaagtcgttccggcaatcggtaacggctgggtgatacatcccacaatcgttgctacgaaaatagcaaacatatgccaagcagccatagaaacgccatcaggacggatcggaccgcagaaccataagattaagccaacagcaacgggccatgcccatgccttagctttaaatttagctaatcccattatattaaaccctctttcaattaattcttaataaccacaccatctaagacatctttcatcttagcagcagagtattttagtttttcgatttctgtatccgaaagtccgtaatcaacgactttttctattcctgttcgattaacaattgcaggtattccaagatacaaatcattaataccatattgtcccattaaaggggctgatattgggagcatgatattacgattttcaataatcgcttttacaatataagcaagatatttagctactccatagaaagtagctccttttccttcgataatcttaccaccacgttctttaactgctttttcaagttcgctatagtcctgagcagttaaatcagtaacttcttttaacggttttccattaatagtggcttcatcgaatgcaccaaacgatgtatctccatgttcccctaaaactaaagcatcaatttcatttactggaacatttaacttttcagataaaagtacattcaatcgagccgtgtctaatgaagtaccagttccgataacacgatgcttagggaatccagagagttgttgtgtcactgtagttaaaatatcaacaggattacttgatacaacaaaaataccgttgaatccactttcaacaattgggttaacaatagttgaaagaatctttgtgttccttgaaacaagatccaaacgagtctctcctggcttgcgtggaactccagcagtaataactacaacatcagcatcagcagcatcagaataatcccccgcatgaatgttgactggactagttagtggagtaatatcttgtaaatccaatgattctcctgttgccttctctttctttaggtcaacaataactaattcatcaatttcttgtgttgtttgaaggagtgagaatacgaatgatgatcctacagctccatcaccaacaagcacaactttatgatgatatcctaacataaaattttcctccaaataatatacaaataattgctctaggcagtttctcactgcccattatttttttactttaagccacgggcgtaaacagttacttgttgacctgcttgacgtccaaagacaattgtttctgcaattgagttaccaccaacacggttattaccatgtaaaccaccagcaacttcacctgcagcatataatcccttgattacatccccattaccatcaagcacttgagtctttgtattaatatgaataccacccatagtgtagtgaattgcaggtgcaatatggattgcaaagaatcctggcttagtaattccacgatccattcctgttgtccgatggaattctttatcgtcatgattttcaacagcttcattccatgttgcaactgtcttctttaagttctcagtatccatgttgaggttctttgcaagatcctcaatcgtatcgccatgaacaacaagaccaactttatcgtaaaattcaattgccttagcatggtcacgaataccttggtcaaaaattaagtaagcactgtgttctggaagggaagtaattgcattagaaacaatctttcgagtgtttaattcgttaacaaaccgattaccttcagcattaactaagattgcaccttcaccacggacagcctcaccaataaggtaaacatgaggattatcttgttgaacagttgggtgaacttgtacaagatccatttgcattaattcaccgccaacgccttcagcaagcttcaagccatcaccagttgctcctggttgattggtagtcttgtaatcagcaaggtcagggcggaaccgcttcatgtattccttagaagcaccaaatccaccagtagctaagataacagcctttgcgtggatggttttaattaggccatcagcattagcttcaacaccgattaccttaccctcatcatcttgtaagagcttgttaactttaaccttattaaatactggaatgttttccttttgaacaacttccaataaactttttactaagaaaccaccaattggcgccatacttgctggacggtgagtacgcttacaagacattccaccagtaattgtaatgtcatcaagcttaatcccatgatcagctaaccagtcgattgctggagctgtgtgatatacaaagtaacctagcatatccttgtcgtttagacgtccaccatcttggtatgtttcgtggtagaaatcggcaacgttatcaattactccatgttgtaattgcacattggtttcagcggcgttcattcctgaagaagcccggttagtatttccaccaagttcttcttccttttcaagaacgaccgtcttcattcccaattcgtttgcttgaattgctgcggaaagacctgttccaccagaaccaattacaataacatcgtaatcattatctaatttacttacagataatggttggaatttttcagccatgatattgctctccttttaattatatttaaatgtattaacagtcaaaaagagtggaacaagttctttttattgcttatttccactcttgccaaaattggcattacttttaactcaattcttatttatcacgatcaacgttggtcatcttaagcatgtccatccattcatcgtattgttcttccgtaagcttaccagacttcaaagcagcttcttttaatgtgctaccagctttatcagcagcttgagcaatcttagcactgtcatggtaaccaatgtgtggtgacaaagcagtaacagtcatcaatgaattatcaactaattcttccatccgcttttcattaactgtcattccgtggatcatcttgtcagcaaatccagtaattgttccagttaataagtcagctgattcgaggaatgcatcgattaatactggcttgtaaacattcatttcgaagttaccttgtgatgaagccattgttactacagtatcgttaccgaatacccgtaaagcagccattgttacagcttctgcttgagttgggttaaccttacctggcatgattgatgaacctggttcgttagctgggatatttaattcgccgtaaccagcacgcggaccagaagctaagaaacgaatatcttgagcaagcttgaacatgtcagctgctaatgtcttcaaagcaccgtgaacaacatctaaaccagagtggttagctaaaccgtagaacttgtttgaatcagcagtcaagtttaagccgtaaacttcgctaagcttttcagcaatcttttcaggcattccttctgcagcattcaaaccagtaccaacagcagtaccaccaattgccaattcatctaatgttgattccaaagtcttaatgtaatcaaggtcatgttctaaggaagcaatgtaaccagaaagttcttgaccaaatgtcaatggaacagcatcttgcaagtgagtacgtccaactttaacagtcttcatgtacttctcttccttaacctttaattcatcaattaaatgttgaacagctggcttcaacttatcaagcgcttctaaagcaactacattcatagcagttggaaatgtatcgtttgaactttgacccttgttaacatcatcatttggtaagatttcaatgtcagggttaatttcatgagccttgtgcgcaacaacttcattagtattcatgttggtttgggtaccagaaccagtttggtaaacctttaatgggaagtccttccgcaattcttcatcacttaatgcgagtaattcatcaatcgccttaacgattaaattacccttttcttcagagatagctttagtttccatattagcttgagccgctgcctttttaatgttcaataaagcacggataattgctaatggcatgtattgaccggttgggaagttattccgactccgttctgtttgtggtccccataatgcttcagcagggattttaacaggacctaacgtatcttcttcagtacggtattctgacatctcaaaaacctccaatatattaattgagcaattttgtcttgtgaaatgttacacatcatttacacgtatatcctaccttgtaagtaaagctatagtcaaatctttaattttcaataaatttcacttatagctattgccttgccaactgttataatagcttttttcaattacgtttgcaaaagtttcacaaacttcgatacaaaaaaacacctaagattttttaatttcttagatgcttttctatttttgtctaataatctggttttattattcacaaagatgaaagctgcttgattaatattgaggcttccaaattttttctgctactacgctcttcgcatcagtaattccgtcgccggctaggccttgatcgatagcagattcagctactcgttcagccactcgcttagaaaattctgttaacttagaaacaggaggtaatacagctgctcctggtttttctgggtcaactaagccacttaaagcatgagcagctgcagcaagcatattatcatttaacactttagcttcagcagccaaggcgccaaaaccaactccaggataaattaacgcattgttagcttgcccaatttgataaacggttccattatactcgatatctttaaccggaattcccgtcgcaattaatgcctttccatcagtccatttgagaaggtcggctgcttttgcctctgctaacttagttgggttagagagtgggaagataacaggccgtagagtatgggctgccatttcctttacaaccgcttcatcaaaacttcctggctgagtggacgtaccaatcattactgttggatgaacagccttaacaactgcaagtaaattagttaattcatcagcattagcaaattcgcttcgttgacgggtaaatggcttttgctttggtgttaagccgggcgtatcgtcaaacaataatccttgcttgtcaacaaggtagaagtgcttctttgcttcttcgggtgtcaggccttgacggatcaattcgtcataaagcatcttagcgattcccattccagcagtacccgcaccaaatgttaagaatgtttgatccgttaacttttcttttgagatattcatggctcctagcacaccagctaaggcaataattccggttccttgaatatcatcattaaaggtcaaaattttatcctggtacttatcaagaatccgtgcagccgttccccgaccaaaatcttcaaagtgtaataaactcttagggaacaatccttcaactgcatcaacaaacttatcgatgaagtcaaagtaaggttgtccttcaacccgcttcatccgattgccaagatagtgcggatccttaagtaatttttcattattcgtcccagcatcaatagaaaccgggagcacttgggatggatcaatcccagccgctgctgtgtaaaccattaatttcccaacagaaatgtcaaccccatttacaccccagtcaccaataccaaggattccttcagcatctgtaacaacgataaggcgaatatcacgaccatcagcggcatcagcaagttcctctttaattaagtcaggatgctcaatgctcaaatatgcagcatcttgcggcttaatgtaacgttcattatattgctcaatcgcctcagcaattacgggatcatacacaactggcataaattccgcaatatgtttttccattaagtagaagaaaagcgtacggttagtattgaatacttccatcaataggtgacgttgttcaatccgtgagttcttagattgatataaccggtagatttcgtctgcctgttcctcaatcgttcttacacaagatggtaacaagcctaataaaccatacttttttcgttcttcaattgtaaaagcagttcccttattcttaaagggatcatttaatatttgcattcctttacgcaacattatcgcctatcctttaccttttttctgtttcaacattcttagagtaattccagcgctagtttatagtcaaatatatgctatgatataaataaaattgataataccccttataatcactgatagagaggcatttactatgaaattaaacggcctaaaatattatcaagcactggtaaaatataaaaatttttcgcaagttgcagcaaaattcaatgtcagtcaacctactattacaatggctatccaacgactagaaaaagattttgggacgtcattttttgttcgtgaccatgtccataaacaattgcatatcacgccgactggtaagcaattcgccattcacgttgacgttattttaaacgaattaaagattgctcaccaagaaatcaatcaagctgaatcatccagtattcgctttgggctgccacctattatcggcaattactactttccgccattaaccccgctattaatgcgagaaggccttttaagccacttggaaacctctgagcatggttctaaggaaattctcaagatgcttaaacacggtcaccttgatttggcattgcttggatcgcttaaccccctaaaggaagtggggctaaaaactactgaactggctgagtatccctttaagattattgttagcaagcgtcatcccctcgctgctaaaaaggagattgattttgctacgcttaaaaatgaacgctttattgttcctgatactgaattctttcatgagcaagcttttaagcaaatttctcatttagctcattttcgtccccaagtcatctaccgaaccgctgacattcacgttatcaaaaccatggttgcagaaaatcttggaattgcttatttaacaagtttggcgattaccccagaagataatatccattccataaatgttactagcccgttaaaacaatcgttccgtctgtcagctgttactcgttcaactgaattattaacagctcccaagcaaaaactatgggatctcttaactacaaaaaaggaatgacaaataaccgtctaatacggtggctatttgtcattcctttttattatttctctttttcaatcttaattgtcttaataataacgtctttttcaggcttatccatcgcatctcgcttaactttgctgatcttttcgacaacatccattccggataatacttggccaaatacggtgtgatggaagtcaagccacggtgtaccaccatgtttttcgtaataatcaataatctcctgcgggtatccaacagccttcatttgatcaatcatattttctggaacatgttcattagtgacaataaagaattgactgccatttgtgttcggaccagcattagccattgacagagcaccagtgaagttaaataattcttcagaaaattcgtcttcaaatgggtgaccataaatactttcgccaccacgtccggttccagttgggtcaccaccttgaatcataaaatcaggaataacccggtgaaaaattacatcgtcataataatttttctctgctaatttaacaaagttttcaaccgttttaggtgcgtactttggaaaaagttgggccgtaattgttcccattgtagtttcaattactgcttttggtcctttaacctcatccaatgataattggggatatttcataaaaaagcctcctcttttctcttctaaacctctctaactatcttagcaggaatatgaaggaaaagacaattattagtcctcactaacacgtaatacacaagctcccttaatatcgccatgtttaacatagcgtaatgcttcatcagcctttgctagtggatattcgtgtacttcaggatggatattgagacggtcagctaatgttaagaattcttccccatcacgacgggtattgctctcaacactcgttaatgtcttttcgtggaatatttctttttggtaattcatcattggaatatcagtcatatgaatgccagctaaggccaaagtcccgcctggaactagactagctaaggccggtaataccatatcaccaactggcgcaaagatgattgacgaatccaaaggaaccggcgcagggtcataggatccttgaacagaagcacaacccaattccagggcgaatttctttgcatcctcaccacgcgtaaagacatgcacttcaattccctgtgcaagtgcaatctgggccgtaatgtgcgctgagccaccaaagccatatagccctaggcggccaccagcgggaacattggcacgttcaaaagcccgataaccaataatccctgcacataataatggagctgcctctagggaatcaaacttttccggaagccgatatgaaaatccttctggaaccgtgacatattctgcataaccaccatcatgatcccaaccggtataaagtgaatgaggacagagattctcatgacccgagcgacaaaacttgcataccccacaagcatgccggaaccatggaatcccaattcgctccccaagcttaaatcgttgtgtttctggtccaaaaccgacaactttaccaacaatctcatgaccaggagtaacgtgttcgtggtgaaccggcaaatctccttctgtcacatgcaagtctgtatgacataccccacacgttaataccttaacaaggacttctccccgtttaggagtcggcacgggcttttcggtaaattcaattggtgatttcttaccatcaatcggcccaggagttgtgactgcccaagccttcattgttttcggaatagcattttcgcgtttttccatccttaaagacctcgattaaatatatatttcattctttattgtagtgctttttattcataagagtgccgtattttttcaatttgacgagaccattgatccttaaattttggaatgtttaacggagcattgatagctggatcatcctttgctgcttgagttaacccttctactcctccgatatcatccaagattccatttccaaaaccactaacaatttggggactgatatgagccggcaatcgtttaggctttacctcctcaaatctaattttaaagttccacatatcgccaaagtcatatattaggtcatattcatggtcaagattacaatcgcctacccaactttgggtaatatcttttgattgaccaaagccactatcaagaatcggcaactgatagtgagtatttccttgatgcagttcaaataagtgatgcccgtccgcgttaaagactgctaagcttgcaaagcacaacatatccaggcgcatatcaccgctgacggtaaatcgccgccacattttaggatgataatcacttagctcaacataaatagtatattgtttattaacatattggattgcatgctcgcgttgatttcttacttgccgctgcatatcacgaattatacgttgtaggtggtacatccgctgtttagaaccaagatcttttagcctctgactaattgcttgaacaaacaaatcgtagtcctcactagagaaaagatcttctgcccgtaaaaactttccaaattcgcgaaaggcatcacttttagaatgaaagccggtatcagtcggacgatcattatgtagtttttcatagttaattaaatagtgatagaccaaggtaatatcgtcaagaacagattcaccgagtgcctcacagtagccgatataatctgcagcacaatctaaatcttgatcaacgatgctctcgctctttccacgactttctaaataatcttgataatcatctaaaatcttttctccgaccgccgttgcattcatgatatcgttaattgaaagtgagcggtaaagatagcgacggttatgttcattaagtttagggtgagtaggcaccttaaagtccgtaactgaatagtcttcaaaaatatccattacaacatattcttcatccgttgtcttattggtaatacgtgtctgttccgctaattgaagcgcaatttcagcattggtcgggtctttttcccaatcaataattgaattaggccccatcatgaggttctgatacatctgcaattgctgttgagttactggctgaatttggcgtgtaaatactactttgctaaattgggcgtcacgaatcatcctaatttttgcatgaggaattggcgaaacttctaataaacttaagaattcacgcttaaataccgcaataaaagatcgtgagtcattaaagcgttgaggatagcgtacaataattggcaacgacattaagttattcataataatcatgaattcaccagtaacacgaattgtccaaacatttgtctctaatagatcagatggtgcaatcacctgtgaattaatatgcaaatgttgggcaagtgaatttcccactgcaataatcaccctatcaactcctcctataatttcgattatattaattttattttgaaaagcattatttatcaacttaatcaaaccatatttactgaaaattataggcagaaagcctgtgactttagtcatgggatgaatgccttccaaagcagccatgagactgctttttcttactaaaaagtctataaaatctcgtttctgcccctgcaaatttagtaatattaaagtataaaggaggtgaaaacatgaccacagttttgaaagggatcaagcttcgcttgtatcccaacaagcaacaacaagctcaactatgtcaaatgtttggcaatgaccgctttgtttggaaccagatgcttgatatggcaaaacaacgttatcaaaacaatcctagtagccagtttgttgatcaatatggcatggatgtattgttgaaacctttgaagcaggaatatccatttctaaaacgtagtgattctaccagtctccaagttgttaatcataacttatatcaggcctttcaaagattatttaagcatctgggtggttacccacgctttaaatccagacggtctgctaagcagtcctatactggtaaaagcaaaattcaaatagtggcgaaccgctatttgagattacccaaaattggctatattaaaaccagcaaaactcgccagttaactcattgtaagatcaaacgctatacggttagttacgatccgtcaggtcgttattacctgtcactacaggttgaaaccacagtacagccactatcgaagactagtcaacaggtcggcattgacgttggcgtaactaatttagctattactagtgacggccataagtatgctaaatttgacgctgtctggttaactcaacaggcgcaacattggcagtctaagtatagtcgccgccgtcatcaagccacggtgagtgtccgtcaatggaaccataaccatcaggacgtcaaagaggaactgaatgactaccagaactggcaacgggcccgaattcagaaagctcgctatcaacgacgagtcgctgatcagcggcgtgattacctgcataagctgacgatggcattggttacgcaatacgatgtgattgtcattgaagatttgaaagtcaagaatctgcaaaagaatcatcatcttgccgcggccattgccaacgctagttggcatcaattccgtaccatgctgggatacaagtgtgactggtatggtaaacagctcattactgtcaagcccaactataccagtcaaatctgtagtcattgtgactaccatagtgggtccaaaccgctcgtaattcgtgaatggacgtgtccaaagtgtggggcccatcacgatcgggatattaatgcggcagttaatattctgcataaagggttaaaagccgttggctagggactagccgtggtaaaagaacgaaattctgtaagttaggtatttggaataccaatgtaacagcctaaatactacttcgcgttcccagaaaccgccgactttagtcggtgtgtagttcataaataaaatagaagatttaaaataagacataagtattgtctctgaaaggatgcgcaacttttgatcaatcaaaatctcgatatctttgacttacgaaaaattcaaatcaataaaactaaagctgaattggaaaataatggtaaacggcagcaaaaagaagtctctagtgacatgttaggaaccttcatgccagttgatcgcgaccccgtcaagataatccagatcactgaagctaacatgatccccgagttgcttccattgcgccaccaaagaatgcttgccagtcgcttttcatttttccgtggcaccgctgaattaatggaacatgaccttaaaagacaagcccaaagcaatcttcccataattatctgtggggatgctcatgtaaacaattttggcttttacgcctcccctgaacgcaagcttctctttggccttaatgactttgatgaagcccgaatcggaaattgggaaagtgatttaaaacggttattagttagtgctgaactagcgggcgaagagaacggttttgatcgcaatgacctttaccacctccttcaattaacgactaagacctaccgccatactatcaaaagcgctaataagatgagcctttcccaactgttttatttttcatttgcctatgaagacatggggaaagcgattgagtcttttggtgatatttcaacgcaaatgcaaacagtccttaataaggttcttaaaaagagtcagcgtagcaattcagaagaaataatccaaaaaatggcaactatcaatagtcaagggcaccttgtttttcgggataacccaccacgtgcacgccatcttagcgccgtgcgttatcaacagattgttaaaggatacaataaatattgcgaaaatgttcgtcaagatgttcgggttcttctcgcaaactttcacatttccgatattatccgctatagtgtcggggttggcagttttggaacacgatgttacttaatcatgcttactggcaatgataatagtcatattgttttacaagttaaagaagctatgccattgcgttataatttactttccctccccgtacaacaagtaattagaaatgggggaatcgctggtcaaagaattgtaacagcacaacgggttctccaatcctcatccgatcgttttttaggaagtacaacttttggtggccgtagttattacattcgacagttccgggatatgaaagaatcaattaatgttaataaacttgactttgaaagttttcaattctactgccagacgtgcgcttatttgctagcgatggctcattttcaaagccccaccgcaccaatgatccgtggttatttaaagcatcagaagatattagatactcttttaccaaattgggctttaaagtatgtcgatcaagtcacagcagactatggacaattcaaattggcaatcgctaaaggaaaattaataaattaattataattaaaaaggacttgcattcatcgttttgcaagtccttctttaatactatttttcagacttttttcgctgatcacttccataacggtcttgttccttgattacactacttttacggcgatgcttattaataaaatcttgctcagcagcgaaaatcattaaaaagtcaataaaatttttactaaaattctttttaaatttgtcccatctatttttgatcattttatatacctcataaatatcattcatctttacttttattcattctagcatatctatttttgtgcaaacgattgtgtaattttaaaataaaattgtggtaaaatagaatttgtaaaagcgcttacttcaaggaggaaatattttatggaaatatctaaagtaccatttggaacctacaaagacgatccagtaacaaaatacattttaacgaacgataatggtgttcaagtaggaattcttgattttgccggtttacttcaatcttttaaggttccaacaaaagatggtggtaaggccgatatgattttgacctctgaaaacctcgacgaatttactaataatggcttttgtactaaccgcttaatcggccgggttgctggacgaattgcagatggtaagttcagtattaacggtaaagattaccaaattgaacaaaatgaaggtaaaaatgctcttcatggtggaactaatggtttttatagtcacatttggcatgttgatagcacgaaagcaactgatgattctgtttccatcactcttagtttaaccttaagtcctgaagttgatacataccctggtaagatgcatgtcactgcaacctataccttaactaatgacgacttcctttcacttaagatgtcggctacttctgatgcagatacgttgttcaaccctaccaaccacacatactggaatatggcagcagcaaatgttccaacggtggatcaattaaagctttatgtcaactccgaaaatcacttagccgttgatgatggcaagattccaaccggtgaaaaaatcgctaacgaaggaacaccatttgactttagtaccccaactacaatgggcgatgcattagaaaaaatgagttcaactaaggaaaatggctttgatgatatttgggaagttactcctagtctcacaaaaccagttgccacacttgaagatccagaaagtggtcggaagatgagtctttactccgatcgtaacggattagttatgtatacgatgaactcagatgatgcagcggtttacaatcacggacaagttcatccccatcttggtttagcaatggaagcgcagaatctttcagatgcgcctcaccatccagaatttggtgatattactttacatccgggagaagaaaaaacatacaccattaaatggcacgttgaatactaattaattactacgcaaaatgcatcgagtaggagataattgattagttcaattatcgacctctcacaccaccgtacgtacggttccgtatacggcggttcgacaacttaatcacattgaattgactggagcgtcttggacatattcataagtccgagttgttccagttttctattagttagagaatagctcaaggtcttactgtgtgcagttcgccagtagcccttgcgggtactagcgaagacatatgcatcacgctgggacagccccagcttctgtaagttagttaccttagttttaagcttcttccattgcttccagatatactgtcttattcggaccctcaaccacttgtcaaggcgttgaataaagtcagttagtttcccaattgagtagtactgaagccatccacgcatttttcgctgaatttcttcaaacattcttgtcagggatattccacgattacgtttagttaataacctcaatgctttctttactcgttgttgcgattgtttagctggacgggcgtaggctccattgtggtctacacccaacgaaaagccaagaaactttaaccgtagcgggctaccgactttggttttatctgggttcactttaactttcaatcgcttttcaagaaactgggtaatgcttcgcattactcgttctccggctcgttgacttttaacataaatgttacaatcatccgcatagcgcacaaagtggtgaccacgtctagtcaactctttgtccaactcatttagatagatgttcgccagtagtggtgacaatggccctccttgtggggttccttttccactcttagcgaaaagcccatggtctaagactccgctagttagaaacttacgaatgagtcttagtgtccatgggtcatcaatatattgttggagatacttaatcatcaagtcatgattaacgttatcaaaataggcttttaggtctaagtcgacaactcttcgataaccttgattataaagatctactacttttgcaatagcgtcgtgagccccacggtgagggcggaagccaaaactattatcagagaaaacacgctcaaagataggtgtaagaatttgggccacagcttgttgaaccattcggtccaccactgttggtattccgagttttcttactccaccattaggcttcggaatttctacccgtttgactggtgctggtttatacttgccctcacgcaaactagcgatcaactccgtcttattttctctgagatatggcagaaggtcattgactgtcatatcgtcaatgcctgctgcccctttatttctcttaactcgcaaataagcctgattaaggttattgcggtccaagactaagtcttggatagtgacactcatacctttaccttcaccataatcggtactacgcgcccttgtgtactttcggttttccaaacctatcctcgacaagcggtcagcttgttgttctgttttctgcgattgtcgcacctgattacacctccgatataagttacaagttattgtcgttcagtccttcatctgattactcagactactatgacctcggctgacttctggcttactcaacgctacatcactgcaccgcttgtttctgtggaaattaaacttattcctcttgtcggaaacgtgtaggccagatctccccgggtaaggatattaactttcgtaccatgtcaccggtagctttactgaaagtaacttcgagtagtgttggactttaacttgtcatgcagtcttatccagttagttccagccttatagctacttcttgttcatcggtgcagtactttgccttagacttccttcagattccacctcacagtggacacccttgtcctcagctcatggttccgactactacggcccatagcggactctcaccgcctagctgatacccatgccgggcgcacataaaaaagagatcgacaaattgtcgatctctttttgtgtgttaggaattataaattaatttttgtcatctaggttatacttcccagcattttgaagatttcctttgccttttcaaggtagtggtgttctgcacagaataccttgatcttgccaccttgatcatcggtaagagctgctagcttttcatcaagttccttaaattccttattaaggtccttaataacgccttcttcatcttccatgtaaacatagtgattttctgctggatctttacgaccttcactagcacgttcttcaagctttactgagtccttatctactttccaagcatgcttaaggattgacttaatatccttaattgtttcgtgttgagcagtacggtgcttctcattgtcaacactatcttcaatctttattaagtgtccttcagcatctgcaatcttctttgcaatacgatccaaagccttaagttgacgttttgcgtaatcagccataaataattacctcctaatataatagctataattcctaattcacttttattatatttttataatttaaattataaaaataacgcgtcttaaaattatagttaattttattatgaggtaatttcagcgcctaaataaatagatgattgatagaaattctcctattcaatcatctatttattaaaaaaacatcgactttttagcaacgctttggcttgtacttactggaatattaaaatcaggcagtcctggaatatgcaactcaattgagccaacttgttgattcttctttatcggtgcagttagttgtttttgatcatctccctgcactcgtaatgttggtttagttgcttgtaatttcatattctttggaagccaaacggtagtcttctttgttagcttaatattagccttattcttatttttatcattctttacttttacactagtaagcttggccgaaagatcacttacttttttgatttcaactggctggtactcatcgactaatttattataaaagtcttgttgcatcttcgactggtcattccattccccttttgtatgcaaggcaactaaaataatccggcgtcctgcaaaggttcctgttgacacaatacatttacccgcgcgatcagtatttccagtctttaagccgtcaatttccccatccttaggagcaaaaccgttttgtggcaaaagagcattcacatttgtcattaaatattgttgatctttagttacatcaaagttagcaaacttttgctttgtaatgtcgagagtttcaggataattttcaacaagatactttgagataagcgcaacatctttagcagataataagttctctgcgtctttatctacgcccttaagtttatgctttcctaagtccccgttaggcagcccgatcatattgtagatttttatatctgtaactcctgcctttttcgcaaatgccatcatctttttattaaaggctgctgtactgcccgcgtcagctaatgccaatgcttctgtacttccatcagcagatacgagcatcatcgaatcaactaactgacggactgtgtattcttccccattcattaatgggacatttgaaaagtgccaatcatccgccatcttggcaactgctggtgtaatcttaatcttttgatcccattttaaatgatggtttcgaatatcttgtaaaattactcctaaagttaagattttaattacagatgcaattggatagcgtttagttgcatttttttggtatagaacctggccactttctgcatcaatcgcataagctgctcgtgcatccatctgaaaagctgcagtatcagcatggactttttcgaacatccccaagccatttaaacagatactaattattgccgttattaataataatttggcaaaaaaagatttaacctttttcattataacaatttctctcctttacacatttaactatcatatcctattctgcctaaaaaaggtgtaacgatttggtaacaattcaaatgaaatccttatttttcattaaattaagaagatgcaccttttaacttctataaattatctgtattattaataagtatgctaattttaatcagaaagggtcggttaaaaaatgcaaagatcgcaacgtcatcgtcgtaaaccgcgcagacttatcttaattatcatcgctattctgctcattattatgggtgtccggcacttcagctcgacaagtgcccgcctaaaatccgcatggaataaaatcattttcacttccaataataatgttagtattgcggtatactcaccaaagacccaccaaatttatacttctagtaatgtaccccagcataagtttcgaactgctagtacagtaaaggttagtattctagcgggaattcttgctaagcaacaaagtcctcttacaagtcatcagaaatcgcttgctactaaaatgattgaacaaagtgacaatgattcaactagcgaattatttgaagattatcttggcggaaaaaacggtctccaacaaacttttgaaaaatttggcatgacccaatctcaggctaatagcagttgggggttaactgttactactccaaaagatcaagttaaactattaaataatattttctataagtctaaagttttatctgatgacgaaagaagtgaaattcgtgatttaatgggtaatgttgaaagtgatcaagcgtgggggatctcagcaagtagcgataattttgcattaaaaaatggttggctaaattacggtaaagatgaatggatcgtcaatagtattggctacgtaaaaaatagtaacggaacagactacacaattgcagtttatacggataaaaatcaatcaatggccgcgggacaacaagcaattgaacaacttgctcgtgtaacaaagccaatattagactaaattgaaatgataaacaaaataggggctggaagaaaacttcaaattttcttccagccccatttttataggtagtttattgagagagataaagcgttttggaaaggaatactacctattttattttgagagagattactaattaatttgatgtctatttttgttccatcactttttcaccattagctgtaatagtgaaagtcttgttagcagcatcagcatcaagaacagccacattcttgccatccttatctttccgcgtaaccttgatagttgtttcagttggtgtttccacttcaattgaaccatcaagatcaaaggctgcaaatttattccgccatgcaagtaagtctaagagattcttaactactggacgttgaacttcttgtgcaacttcttctttagtgtagtagtgacggttgatgttccgaccttccttagtcttttcaagtaattcaaggtcatttgaaccagcaagtaaaccaacatagtaaaccattggaataccaggtgcaaatacttggaatgcacgagaaagcaagtaagctttgtcatcgtcacctaatgcagagtagtaagtagagttaatttggtaaatatccaagttgttgtattcagcacttgagtatttccgcttaacgttagcaccaaccttgtataattcattggatgcatattcgatttcatcatcagttaagatatccttagcatcaacaaccccaataccatcatgagtatcaagagtagtaaattgcttcattggtgacatctttaaccacttagcaaggcggttagtcttaccagagtaaagggtataaagagtagtcattggtaaggtaaagtcatagatgaagaagtcatgttgtgaaatcttttgtggaatggtgtagtgttcgtgaatttcgggaaggatgatggccttgtaaggagccaaaatatcttgaacttcatttaagagatcccagatttcaggttcaacgaagaaatcattagtaccaaccttcttaatagcgtaagcaaaggcatcaagacgaatcatatctgcaccgtgcttaaccatgtcaattaatgtttccttgaagaattcgttagctaccttactcttaacattaatatcaatttgttcttcaccgaaagtgttccataagttttcagtagtaccatcatcaaaggtaatttcttgcttaggagccttatcctttcgcttgtaaattaaatcaacatcttcttgagttggacggttcttaccagctttttcccagaacttttcccaacgaataaagaagtcgttgtacttagaatcatcgtgcttcttcttgaagtcttggtacatttcagacttcttggaaatatggttaatcatgaagtcaaacattaagtagtagtcttcacctaatgcttcaacatcatcccagttaccaaaagcagaatcaacaacatcgtaacggtatggtgcaaaaccacggtcaccagttgatgggaagaatggaagtaagtgaacaccgccgattgcatcaccgatatagttctttaatacttcatgagtttctttaatatttttacccattgagtcagagtaagtaattaacattgcttcatttttgattggcataatgatatcctccaataattttaaatttagttagcttgtttagaatgacgagttgcaaagaaaataattaaggcaataactattagcattaccccgtagattgggaatggtgcggcaagatcaaggccactcattgggcgaccgactaatcgattcatccattcagcaattgttggtgagaagaaagctccaaagttaaaaccaatcagtaccattgaagttactaatggttgacgcttagcaggagctaaatccggtaacaagttaaaaatcaacggagaaactaattgtagtgggaagccgattaaaagcaaaccaattactaacattgcaaagttgccgtttgcgaaggcaaataagaagtttgaaatggccattaacccgagaccaaggtaaacagtgttaaaacctaacgctttattaattgatccgtagaataaaccaccaagcgttgccccaattaacattaaggaaagaaacattgatgaaccagtatagctacttcctttaattgcaacggttaagccagggaaacgattttccattccaacataatctacaaccaagaggaaggcaaagagaacaaggaggtaaactactggactaatctttttaattggttcttccacttcagttaattcttcagcaagatcgtcttctgcaacgttattatcttgtgctttgctatcgtcaggaacacgaactgcaaagaagaaaagaacaacgaaagcaagaagataaacggcaaatgatgcatgccaacctgcataactaagaattaatccggcaattgcaagggtacaagcttgaccgatttgttcagccgcagcacgccaaccaagcatttgagctcgggttgtaccttcataccaaactgaaatcatcgaaattgcttgagagttatataaaccaaatcctgctcctaaaactaaccgggaaatcaaaatcgcagtgtagtcattcgcaaatataggaacaattccggcaagaccaacaattgtaaccccggccataataatctttttatcagaaatattgaaccattgttgaagtaatggtgaaaggacaacaaaaatcattacagcaaatgatggagttgtaactaaatattctgactgtgtctgtgagattccgagtgccgcctttaattgcggtaaagaaccttgaatggcataagcactcgtaaccatgaacgaaactgacaggaatgccaatttggtaacaagagaatttttgttattcataattagtagatactctttctataggtatttgacaaacgtttatcatttctgtacatcaataatatacaatgaacttttcaaaatgtcaaacgtttaacaaagatttattacaaaaaattgtaatcaattacattgttattataacgcgctttaaatgaaaatagatgaaaacggatgagaacgctattttagctcttttttgaacaacttgtgaacaactatacattatatttttataatttttttattaaaaaagagtaaagcaatgactaattcatcgttttactcttttttacttaatccacacaaagcttcttgattgcctgcgcatagatttccatcgctttatacatgtctggcaatggccactgttcattagcttgatgcatataatcgggagttgttggtaacattccgccaaaggcaacacaattattcatggttcgagcaaatgttgccccaccagaaatttgtggttcagcatcaacatccccagtttgttctttataaactttcatcaaagtttgcactaatttactgtcttttggaacgtacagaggggctaaataatcaaaatgaacatacttcaaatcataagctgccacctgtttacttagttttgctagtaaattatcgcgatcgatcgttacgggaatccgtaaatcaatctgcattcttgtttcattttcattaatctcaagactagaaatattgaaagttaattgtccagactcatcgcgaacatcaccgagaacattgctccccgttgcatcttccttaaataatttgccaataaaatcaagtggcttaaaatcaaaaacatcatcaagcgcaatcactaaccgtaaaacagcattcgttccttccggtgccatcatcgcatgaacagacttgccaataacagtaattgaattaccgtcacttgtatattcaaagccatgcttatctaaagccgccttcacttcatcctgctttggaccatcgtacactgcactatcagggaccgcattaaacgcatttttcaagttaatctttagttgatctgttcctggaccaacgagataagattgttgcaaccccttttcagcataaattaatggaaattcagcatcaggagaaattccactatcaattggcgcttcctttttattatattcagcaattccacgccatagaatttcttcatcagttccataaataaaacgaattcgttgattgaagtgataaccttgatccatcaatgctttaacagcatataaagctgcaattcctggacctttatcatcttgtgaccctcgtccataaactgcatcattgattactgtgcctttaaatggatcatgtttccatttgcctaaatcgccggcaggaaccgtatcaagatgacaaattacaccaaaaattttgtccccactaccaacttctgcatagccatagtacccgtctggatcttcataggtcttaaaacctaattcatcacaaatcttcatcatttcatcgagggcgttacgaattcctttgccaaatggtgcgccttcttctgctggttgattatatgatggaacagaaattagtcgttctaaagttttaacagcagctttttgttcatcttctgtaataattttatccattcaaatcccctcctagagcaaggcagcaattcctaagaacaagcaagtagcaacaaagagataaatcattaatttcagcatccacttccaccaaatgccgacattaatatgcgcaattgctaatgctcccataacaactcccgaagttggggtaataaggttaacccaacctgaagctgcttgataagcagtaataacaaggctaccagaaacatgcgcaaaatgtcccattggtccgataattcccatcgttgccgcagctaacccagacgttgatggaattaagaatgacattgggatatagaaaatgtaagtcaaaataataaagatcgtttgtgataatccatgaaggcccaattctccccagtgaagaactgttccagtgatcatcccattattcattattacttgaattccccgtgcaactgccacaataattgcaacgcttaagaaatctcccattcctgacatgaaagcatcaataaattcactttccttcatatggtaaacagccataatcaagaccgacataaagaggaagagcatggtaatttcattgaagtaccatgttccaagaggtgccatatcatgccctaataaatcgcctaggaatggaatattaaccaaccactttgtaaatttatcaaaaaatgtccaatggctattaaggtttgaccatggaattagtcctagaatcatcacaacaaaagtaattccgaatagccaaataactgtcttttgacgaccggtcattttatggtcgtcattaggatcagccttgactaaaaagtgcttttcatcttctgctcgttgattgtaaactaatgatttagttggatctttttcaattaccgatgcatagtggtaaacataaataatactaatcgttatcgtaataattaaaaggattacccgggaaactaaaccatcaccaggagaaatatttaacgtttgagaagctactcctgtggcaaacgggttaacagttgatgctaaacaaccaacttgacttcccactaaagcaatcgcaaccgctacaattgaatcaaagccaacacccatcatcacggggatcaagagaggagaggatagaatgcaatcgtttcttcccccattccatatgttgatccaccaagagcaaacagaagcattaaaattggaatcaattgtttttctcgtcccttataccggcgaacgattgaaccgatcccttcgtttaatgcatttgtcttattaaccactcctaggaatccaccgataacaagaataaatagtgatactgagatagctccatctgtctttttatcaccgaccatcccgataacgggtgccataaagatatcccaaattccctggggtttatttgtcaccgccttatatgtgccagaaataatatttccagctttatccgtctcatatgtccctgctggtataatccacgttaaaattgcaattaaaataataattaaaaataaaattgtaaacgcagagggcatatgaaaatgatgttttttcttcgtttgtgtttcctgcacaataaccgcctcttttgtaaaattagtatcaattttattttaattcagtttgaaagcggcttcaacttaatctaagaattatccttaaagaatgctataattgccttgtagtaattttaaggaggatgaagctaatggtaatgaatcctaataaagcacaagacgtttggaaagacgccggtgaacatgtccaatttactgtattagaattaaaacgagaaaatcaagcaaaggaacaagaagcaattcaagaatttgttgaacggttccaagcaattactcgatcactgcgaattcgggataataagggtaatcttaaagtttctttaggctttagcaacgacgcatgggactatcttttcccaaatgcccctaaacccaaagaattagaaacttaccaaacattaaccgggccaaaatacaaaatgcctgccgcaaaaggagatattttcctccatattcgtgcaaacgatgaggctgcagtttacgaattcatggctcaagtaatgctctttattagagatattactaatgttgttgatgaaacaaagggctttcgctattttgaaggccgggccattattggctttattgatggaactgaaaatccggaacctcaggatgctgctgaatacgcaattattggtgatgaggatcctacgtttgaaaatggttcatatgcctttgcacaaaaatggcggcataacatggacatttggaataagctaactactgaaacgcaagaaaaagctgttggacgaaagaagttttctgacttagaattaagcgaaaaagagaagtttaagaatgctcataatgtcgcttcccaagcggaaattgatggtattgaacagaagattgtacgcatgaatgttccatattcagaccctgccgctgataatactggaactttctttattggttattcacggcattggactgtaactaagaagatgcttgaaaatatgcttgagcaaaacgattatctcctaactttctctgatattttaggtggtcaactcttctttattccttcgcgtccaatgttggatcaaattgctgaaggcgaattaaattagttgattgacaagttgaaggcaaattgctatattattagcagcaaattttaggagggatcatccattgaaattttaattctacacaatttaatgtatctggaactgtggattcacgcagaaaggtactacgggtagaattatttttcaatgattgatcaataaatgagaactaatgggccaataccattagtttaaaagtctacctgtagtggtgggctttttttcgttaccttttctgcgagtaacgaaagggtgattttttaatggaaccaatcacgataaataatttaacttttgcttatccgggacaagaaccgctttttaatcattgtgatcttaatattagcagcgattggaaacttggtcttcttggacgaaacggtcggggcaaaaccacactactcaaaatcttgcaaaagcaactttcctttcaaggaagtattcaaaccaatcttaagtttaactattatccattagtaattcgtgaaccgaatgattacacaatgaatgtccttatgagaagtggctatcaaggtgagcaatggcaaatcgaacgagaattaaatttgatggcaactcccacagaattactatggcaacctttcagtagtcttagtggtggcgaacaaacacatgtgatgctagcaaccctttttgcccaggatggatatttccccctgcttgacgaaccgactaatcaccttgatcaggatggtcgaaaacaaattgctcaatatctaaaagcgaaaaaaaacggcttcattatcactagccatgaccgagattttctcgataaagtcattgaccattcattagtgattgaacaacaccagcttgttttaacccgtggtaattacagtgattatttcgttcataaggagcaacgagattctacggccatcaagaaaaacgaaaatttattaaaagatattcatcatttaaagcaaacacgtcaggcaaaatctcaatgggctcaacaagcagaaaatgaaaagaagaataattctcatgcggataaaggctttattggtgccaaagctgcaaaaatgatgaaaaaagcaaccataatgaaaggacgcttagacaccgcaatcgaggaacgaaaaggacttttaaaagagattgaaaatgttgttccgctaacaattaatgtcctccccactaatcatcaactattgttaagcattaatgatctaacgttatcgtatccaactaaacaactctgttctaatatcactgcaaccattgaaaaaaatgagcaggtcctgctctgtgggaataatggtactggaaaatctagtattattaatgcaatcatcgggacattcagtggtaagcaaagcggagatatactttttagcagtgcccttaaaatcagcacagtacgtcaagattattctgataatcatggaagtttacgtagttttgcatcttcttctaaaattaactacgatcaatttcttaaccttcttcgtaaattagggatggaacgtgctacttttaatgttccgattgaagaaatgagtatgggacaacaaaagaaggttgaactagcacggtcattagctgagcccgctcacctttatttatgggatgagccgctaaattatcttgatacctataatcagcaacaactaattcagttaattcaagaaaagcgaccaccaatgctaattgttgaacatgatcaaaatttcattaagcaaactgccacaaagaaaattgaaatttaatatttcctgggaaataatcaaatttaccaacttaatgtaaaaaaggagctgtgacacaagttaggtcacttccacaaaatacgaacagcgcagtacaacaatggccttcatcgtccggcaaagtcgaacgttgaaggcctattgttgcttgcgggggctcgaaaacgaagtcacgagtgacttctgtctcgctcccataatttttagctaaattaaattcaattcagttaaccactcaagaaatagtgggaaccactttcccatatgattatctacccgatcattattgacaataccagtatattcgttagctaatgcgattccatgtcccccagtgccaaactcatgtaattcatatggaacatcatacttgattaacgcatctgcatatacttggaggtgatcaacaaagggagttaattcatcttttgccgatccccacataaaggttggtggtgtttgtggatttaccaattccgctacattttctgttgtaacccccatgcgttcatcaatcaagggttgaataacaggatatcctaatgcggcaaatttagcgtgtgttagtttttcgttactatatgcagcggcaatttggcctcctgcagaaaagccaataattcccagtcgatcaacgtcaacatctaattcatttgcatggttaacaatatattcaaatgcttggtgaactgctattttggcttcttcataatttttatgttcaactactggataccgcacaacaaatgtttgccatgcatgggttgcaaacgttaatgccacccgctcagaatctcgttccataatcttgttataactgcctcctggcaaaataacaaggccgggtaaagttttatcagtattactatgataaatatctagagacgaatatggttgatctaagttaacacttttaatttccattttctcacctcattttgattttgctaaatgttaaaattacaaataatagtataacctcaatatgcaataaacgatacaggtaaaaaattgttattaattcacaaatttccccttgtttatcatgatacatttgttaaagtgataaggtatcaattattatttgggggttagaaaatctaatgagtattatgaagactaagtcattctggattgctgctattatgaccttaatttgttctgttgctggggtgcttttagcaaaactaccttatgtcaacctgattggagcattggttattgctttattattaggtattgccatgcagttgactcctgctagcttgcggaatgaggctcaaggcggcatcggatttatttctaacaaatttttacggcttggtattattcttcttggtttccgcttaaacctagaaaaacttgctgccgctggggttaagactattttggttgcggctattggggttaccggaacgattgtcctcacttattggcttagtcgaaagtttggtgcagaagatgaattagctatcctttctgcttgtggctgtggtatttgtggagcggctgctgtaatgggggtttcaccacaaattgaaactgacaacgaggagcgcaaacgagaaaatgaagtattagctgttgccgttgtttgtgtaatggggacagtctttactttagttgaaattggaatcaaaccattactcggacttaccgatccacagtttggaattgtggctggtggttcattacatgaaattgctcatgccgttgcagccgggggagcttttggtgaagcaagtttagataacgcccttattatgaaactttcacgggttcttctcttagcgccagtcgctttaattgttggttactggtatcaacaccgccttatagttgaaagtgaagaagaacatactaaagaaccaaagaaattaccaattccttggttccttggtggttttattttaactagtgtgttaggaacctttcttccattctcaccagcctttcttgatgcacttgttcaagcagcctatatctttttaggaatggcaatggctgcattaggtgtttcagtaaactttaaggttatttttaaacgtggaggggccgtttttggcgcggctgtgattagctcaacctgtttattggtatttatgattattatgagtaaaatattcttctaagttattaaaagcgttaaattgaggatttattttagtggcatatagccattccgccaatttaacgctttttatttatattttttatttatattcttctatttaaccgtctttcccagctggtaagcttcttcaacatgtttagctagtttttgattattccaagaatcagctgcgagcacctctcctactttatcccaacgcatatattcaagcaattgcttaaaatataagttaagtgaagcaaaggcatctgcttgaccataaccacttactaaagtaatagctttctttccgccgtgaagttcatggttatagctgtagaaacgatcaatcactgcttttagcgctgcattgatcccgtaataatatagcgaactaaccaagactaccatatctgccgctaacagcttaggcattacttcattagtaataacatcattcggttcaatcgcaacttcttgtccgggatgattgtcctccaatttaatcatcgaaaattcatcggtccggcgtccagcatcaaagcgataaacttcatttcctgcttcagttgcgcccttaacaaaggcatctgctaattgctcagaagttcctggatgatggggacttcctgttaatacaataatcttcatcatgatcccgtcctttcttatttaattatagtgatagttcgactaaattagaaatagaaacattgaatattaatagataactaaaatgaattaacgaggccaactaaagattttcaaccaatttaacttagtacgctctcgtttttgttcttccttaatgtatgaacgatccgtaatgaaatgaaagatattcatgcctattcctcataaatatgttcactaaggtagcgctcgcttgaatcaggaaataccgtgactaaattagccccgtgtggcaattctttagcaacttctaaacttgccgcaagcgcagccccactagagctaccaataaagaggccgagatttttagcaacccagcgaacataatagaatgcatcctcatcactgattgtttttaccccggtataatctaagtccttgaaaaacggtggaataaactccactccaattccttctgtacggtgactatgggctggacccccatttaaaatcgatccggctggttcaacaatatagccttttaattctgggtaagcatcttggagcgccttttgaattcccgcaaaagtgccaccacttcctgcaccagctacaaaggccgccagcggtttattagcaagatcagctaaaatttccggtcccaaggtgcgttgataaacatcagcattcgctggattctggaattgtaaaggcacgtaagcatccccgatttcagcagctaattctttggcggccgcaattgctcctttgatcccttcttcactcggagtattaatcacttcggctcccaacgcacgcattaatgtttgcttttcaaaactaaacttttctggtaccactaatttaactggtaaatggtattttagtgctgctaaagcgactccaatccctgtatttccggcagttggctcgatgattgtcgttgtatcttttatttttccttcttccattcctcgctggattagcgccatccccaaacgatccttgatactgccacctgggttaaacatttcgagcttagcataaatattaacgtcattcggagtcttcatcggcaagtgcattaagggggtgtgaccaatcaaatcataagtattttcaactaacataatagttccttcttcctcagaaaagtaagtgggaattaacctcctcgacaaggcggtgggctaaggatagaacggtgattagcacggcacgggctgattatcgttcgaacttagcctcgagccttgtggttaatttccacgatatcgtaacaatatacctataaaaaacgaggctgttgaaaaaacaaaagttttttctcagcctcgccttatgtgttatcaacttgatagtaattcaattaaaaatgagtataccaaaaagtgagtcgcataagacgcgattcacaacaacaaatatttgcgttaacaaaataattgttttccattggtaatttcctcgtatttcaaattacagtaataataactagttaaaagtaagttgtcaagaaaatttacatagacaggtgtaaaataaaaaagaatcattttataaaacaggagcgctacacatgaaaaagaacggactattattagtcaatctcggttcacccgatacgccaacaactcccgacgttaagcgttatttgaaagaatttctcagcgatcggaatgttatcgaaatgccaccagcactatggcaaccactccttcgcggaattattcttccaactcggtcatggcgatcagcgactttttatcgtaattgttggacaaaagatgggtccccattgattgtctacacagaacggttggttgctaaggtccagaaattgatgccggagtggattgtcaaaatggcaatgacctatggcaagcctaaaattagtgacacaattgtcgaaatgaaaaaggaatgtcaaaatattacggttctccctctcttcccttttttcactaaaagcacaacccaaacgatcattgagaaggtaaaggatgctgatccagaagcgaaaataattgatcgtttctcggcagaagaagattatttagacttattggctaagcaaatccaaacggcatgggataaagggaaatatgacaaattactcatttcgtatcatggaattccgacagccatggttaatcatggtgatccttatcgtgatgaaacagaagcggccaccgcggaactgattaaacggctggacattcccgaaaagcaaattaagatggcttaccaatctaagtttggcccaatgccatggttaaaaccttacctccggaatacgctgcttaatgaggcacaactcggtcatcgtgatgtgttagtcgttgctccatcatttgtagcggactgtttagaaacattagaagaagatcaagtacaaaactatcaggtctttcgtgaaaacggcggaaataaccttgtaatggtgccttcgctcaatgactcaccagaatttgctcagtttattactgatcttgtgcaacgaaagggataaaaatggaacgaaaaagtttagacgaaatcaatgggagtgttgatgtaccaaatgtctatcaaagtgcattttggcagaaatttctcgcttatagtggtcccggtgctttagtcgccgttggttatatggatccaggtaattggttaacgtcgcttgccggtgggagccaatatcgctatcagctattagtggtcctttttactgccattttaatcgctatgtatatgcaatctttagcaatcaaactcggcgttaccacccgaaccgacctcgcccaagcaattgcgcggcgtttacctactcccctgcggattgccctgtggttatttaatgaaatagcgatgatggcaacggacttaaccggagtcgttggaactgctgtcgccttaaacatgttattcaagttgcccttacttatcggcgtcctgctaacaattgcggacgtgctagttgtcttatttttccttcattttgggatccgccgaattgaatttatcgttttaactgctattctggttgtcggcgccatctttgcgattgaagtctgtcgggcccaccctgaattttccgcgatcatggacggttttgttcctcgttccacaatttttactaatcacagtgagttgctaattagtttagggattgtcggcgccacgattatgccccataatatttatcttcattcctccctggcgcaaagtcgacgctacgatgaacatgatccagagcaagtcaaagaaacgctccgttttgctaattgggattcattaattcacctttttgcagccttcatcgtcaacgcccttctgcttgtactaggcggaaccctcttctttcatgcggcaagtctcggtagtcttgaggatgtctttttcgggctaaagaatccccatatcgttggtgctctagcaagcccattaatgagttggctctttgcctttgctcttttggtaactggtttaatctcctccatcactagtaccttggctggacaaattgtcatggaaggatttatcaatattcgcctcccactctggaaaaggcgtctccttactcgagccgtaacccttgtgccaatcctaattatcggcttcatgattaattttaacgaagagcaatttgagcaactcatcatttatgcgcaaatcgtcctcagtatcgccttgccatttacgctctatccccttgttgctttgacaggcaataagaaactgatgggaccacacgttaattcaccatggcaaaccgtccttggatatgttttggctagtttggttactgggttgaacttgttggtgttggtataatttttatttattataaatccaatagatagatacccttattttcaattatcagtgtttaaaaaactaatcaaatattgtaagataataataaattttgttgtaatttttgatgcaataaaagactggtcactatttacttttgggatagtaatttgatattaaaaatattttatctttggtgtgacgcttttatcaatctcattttacaactgaattaaagaagcagggctgaacgatatttatgttcaaaccctgcttctttattttagtttcgtcgtgcaatcatcacgcgctgtccacctatttgtttaactttaatgtctttaaaacgataatattccagtagttgacgatagcgttgtacagtagtagcagtaatcactatggttcccttaaaagcgaggacccttatcgcctcttgcaaaacacgtccttgcgtaattgccggttttacctgctgtaaattactaatcagaacatagtcaaactgatgatcagtgaaaggcaaattagtgttatcagtcaattctactttcgcgcgatcagctactgcctcttctttgatcagttctttcacttgctgtgcttgcttttcatttttaactattcccataattttgccgggagcagtcaattgcttggcaaggttagtaaacgtttttccattaccaatgctcatatcaaggatttgaacatccccgcgtatcgataaatcagcacttatctttttccagacctgttgcctttgccagatcaaccatccaataattccaacaactataacaattacgatcccaataacgactatcaattctcttcacccattattttaactaacaatatcgtttagcttccgaatatcctttaactgcccaacaactgtgattttatcgtgcggttgaataacatcattagcttgtggcatttgattaacttcatcatccttactaacaatgataatcacattgacattataacgattacgaaaattcagttcgtctaaggtcttattaaagaactttggattattaatatttacttctgccaaagttatttccttactcaaggtgacataatcaacgacgcttggatttagttgttgaaaaataagccgcttagctaaatcatgctctggacgaacaaccatatcagcgccaattcgttccaaaacgcgcgcatgattaacattttcagcccgacagattacatctggtgccccgagttctttagcaattagcgtggccatgatacttgcttcaacattttttccgattgaaatatacacatgatcaaaactaccgatatcaaggtcacacagagcatcctcatcttgcgcgtccgcaattaccgcccgcataactgaccccgcgaattcatttaccacttcttcactagaatcaatcgccaatacttcttgaccagcctgaactaaagcttcacatatcgaggccccaaattgcccaattccaataacagcataactttcttttttagccaattaacacactctcctctggataacgataattcttcgctgctgtacttgcatttaggattgagaacattacagtataaattcctacccggcccacaaacattaaaaacattataataaattgacctaataaattaaggtgggttgtaattcccaacgatattccagttgtcccaaaggctgccactgcctcaaaagtaacatacgccaacgaatcatgttttggcaaatcctgtgtttcaacaagcaacaaaattgatacaagcaaaataaataaagcaacaaatagtaatgtcaaagcacgataaatattttcttgggtaaaccggcgatgagcaaatgtcgtgtctcgctgcccacgcaaagttgcaaaactctgaatcgttaatagaccgattgttgtggttttaaccccaccagcagttgaccccggcgttcctccgataaacatcaaaataaccgtaaacgcgaggccggcagcacttaaatcagtataaggaaaagtaattaaaccggcagttcgtggcgtgattgccataaaaatagtattgagaatacggttggaaaaacttaacttatcacttaattgtgctaagtttttctcggtaataaagtaaacaaccacagaaacaacgaataaaactgctccagtacgtaacgctaactgagtatgcaaggatagccggtgatatttaggataattgagaatatctttccatactaaaaatcctaatgatccggcaacaatcaaaacagcaagcacacatagcatataagggtcattagcataatttgccatactattatcaaacaagtcaaagccggcattacaaaaggctgagattgaatgaaaaatactaaaccatattcccttaccgagtccgtaacacggataaaaatcaaaaaataaaaatattccacccgctaattggataagtaatgaaagccgaataataaggtaaaccacgttcaattgggataagtggtcaagattaagggcttcttgagttaataatcgtgttgacattcgcattcgttgccggatcagtaacgacatcatgactgcaaacgtcataaaacctaagcctcccacttccatcaagattgcaatcacaatctggccaaataatgtccagtgatgagctgtactaacaagagttaatccagttacgcaggttgcactcgttgaagtgaagaaagcagtcataaaatttgtcgtttctcctggtcgtgttgcaaacggcaaggagagtaaaattgttcccataaaaataacaattaagaacccaaatgtaagaattttgggaaatgtatatttatgtttatttatttcaatcacttttatccttcctcatatcaatattactcaactaattataagcgtttttgttaaattctaaaccattattttatttcccgggaaatcatctcgagaaagcgctacaatataactgtagattacccgattgcttttcctgaaaggagatccttttatgtactattcaaacggaaattatgaagcatttgctcgtccccgtaagccggcgggagtggataaaaaacatgcttacattgttggtgctggtttagcaggcctttctgcggctgtcttcttaattcgtgacgctcaaatgccaggcgaaagcatccatatttttgaagaattaccaatcgctggtggttcgctagatggtcaagatcgccctgatgttggatttgtcactcgtggcggacgagaaatggaaaaccactttgaatgtatgtgggatatgtatcgttcaattccatctctggaaatccctggtgcatcttatcttgatgaatattattggttagataaggatgatccaaatagttcaaattgtcgcttaacttataaacggggcaatgaggttcctactgacggcaagtatcttcttggaaagtcaactaaggaattaatgaaactaatccttacacctgaagaccagctcggcgatttaacgatcagtgattacttctctgaggactttttcaagagtaacttctggatttactggtcaaccatgtttgcttttgaaaagtggcattcgctagcagaaatgcggcgatacgcaatgcgatttatccaccacattgacggcttgcctgactttactgctcttaaatttaataagtacaaccagtatgaatcaatgactaaaccattgcttgcataccttaaagatcatggtgttaagtttgaatacgatacccaagtccaaaacgtcctggttgataccaagaatggtgaaaagcacgctaaaaagattattcttaagcaaggcggcgaagataaaaccatcaacttaactgacgatgatctggtatttgttactaatggttcaatcacggaaagttcaaattatgggagtcatcaccaggtagcacaaccaacccgagcccttggcggcagctggaaattatgggaaaaccttgctaaacaatcgccagcattcggtcacccggatgccttttgtaaaaacattcctaaccgcagttggttcatttctgcaactgctaccgttaagaatccacaaattgaaccatacattgaacgactaactaagcgtgaccttcatgatggaaaggtaaacactggtggaattatcaccgtcactgattctaattggatgatgagttggaccatccaccggcaacctcattttaagagtcaaaagccaaatgaaaccattgtgtggatttatggtctctattctgatacagaaggtaattacatcaagaaacgaattgttgattgtactggggaagaaattactaaagaatggctctaccatctcggtgttccagaagctttaattgacaatttagcaaaagaagagtcggttaataccgtccctgtttatatgccattcgttactagctactttatgccacgggtaaaaggcgatcgtcctgatgttattcctgaggggtccgctaacttagcctttattggtaactttgccgaatcgccaactcgggataccgtctttacaactgaatattcagtccggacggcaatggaagctgtttacagcctcctcaacgttgatcgcggggtaccagaagtctttaattcgatctatgatattcgcgaattaatgcgggcaatgtactatatgaacgataaaaagccgcttgaagaaatggacttgccaattccaaagattgttgagaaaccactgctcaagaaaatcaagaagaactggattggcgaattaatggaagaacaacatttactttaaaaaactaggggagtgaggcattaggtatctctacttttgtcccactcccttcaatttaatataaaggagtcttttttatgaccaatgaaacgattaagcaccaattaaaccatcgtacaattcgggcctttaagcccacaactctttcaacagaacaattgaatactctttactctgttgctagtcatacaccaaccagtatgtttatgtagcagatgtcaattatgcacattaccgatccagataaacgggccgtaatcagagaaattagtaagcaaccgtatgtcggcgcaaacggtgacctgttcattttgttagttgacctttatcgtaaccaacaaatacgacagcaaaagggcaaggatgatggccgtttacataccgctgatattttcttccaaggccttgatgatgcaatcatggctgcccaaaacatgattactgctgccgagagtatgggccttggcgttgttccccttggttcaatcaaaaatgatccgcaaaaaatcatcgaagtccttaacctccctaaaatgaccttcccagttttaggcttacaaatcggtatacctgaccaagaacctcaactaaagccccgcctgccattaaaatttatcgcatttgataatgactatccaaaagagatcaagctcagtgacttaagcgattatgatcaagaagttactacctactatgaccttcgtgatgccaaccgacgaattgattccttcaccaaccagattgcgggggctaaactcgatcgccactataccaagcgcgatgaaattatgaaggtgttacaccgacaaggtctttgcactgatgaaggaattgattagttcatcccctcaagagcagctaatgtcgttaaggtcgcatcataataatttttctctgttaagggtttactgaaaatgtgtttctggctagcaaacagattatcatacccttcattacgattgcagctaaccgcataaaaaatcggcgcactgaaactatttgattgatatttaaccaatcggtgaccgtttaatgaatagccagccgtaatataatactgttcactgaagaacctcatcattttatttaagactttctgagctcgtggatcattgctttttgccaacatcattggaacccgacaagcattcgcactatagtctccatcatattttccagcaaccgtattcggccccactggcttggtactccctggtcgagcccaggcaaagtcaggtactagtcctgttcggtgctgtttacttaatgcagtcagacggtcaagcatattatttttgatcatctgccaccttgaatcgtgagtacaatcgtataaatgatcaaaaactgtcggcattacatctgaagttcgcaataaataataaaacttagaatccttcgtaacccaatcacccactgttaacatgtgcgtggttgggttatattcatatttcataatatcagtggcaatctgttgctctagcttatgataataaggtgctttttgtggccaaacttttgcagcccggtgaagagccgcagcaatgtaaagatcaccatcagtcgcactattatgatcatcaacccattgaccttctttattataagactgacgccaggacattaagtaagttagctggtcatggtgttttccaacataatcgcgatgtgcaaggtaatagttaagtaacttatcaaagtcattttcacttgcccagcccttttcagcagcgcgagatactacttgcagcccgtagccttgtccttccgataatgcaacaggatgtttttggtcgttgctggtattaacatacgtttgcttattatttttgcggaccaaatatgtcccctgccaccgccgataagcttcgtattgaatatgttcaggattctttattcttacaaacgcgagcgttgcaatataaataactgcaacaacgagcgtaagaagccaaatatatactggacgtttcataactaatccccttattagtcagcaaaccgcttagtctttacccattttgtcccgtcacgccgtaatagtcgatcaagtgcaactgagattaccgcatgaatcgaaacaattataaataattgtgaataggtaaagtatgaagcaagcgctaaccagatttgcttattcgtcgcttgcccaaattgcgtagctgctgctgttgtaatttgtaaaatatacaagattatcattaataaccaattaaaaagcaaaagttgggcgattaggatgttactttccccgaatgtaaagggaatcattacctgtggattgaaaagatgaacaatccaaaaacctacgttcgctaaaaagattgcatcagaaagaacaattgccgcattaaaccagaaaaaagtacaggaataataaagagtttctaactttactcgccaattgctccggtcaaaaagatgcctaaaatttttcaagacaacctgataatttccttttgcccatcgtaaacgctggtagtaataatcatgcaggcgttttggctcctgttgaaaagcttccgaattataagctaacgcgattagttttccactttgcataatcttaaatgaaatatcagtatcttctgttaaggctccatttgcccagcctccgattgaacggacatatttactttgaatgataaagttagttcctgggatccggccaattttaaataaatgccaaattgcacagtgctggatccgttgggtaacaacaatttcttgattaatgcacttcgttaaaaagttttgctcggcattgcgtgtcttattccggccaaatgctgcaacgtaccgtgttggattttcgaggatttttcgtactaagaaatagagggcgtttttttccggcattgcatcggcatcgtaaacaccaatatattcaccatgagccattttaagggcatcgtttaagacaccggccttccctccgctaccatgacgttctatcacctttgcttttcttttctcatattttggaagctgtaacactgttcgggcccgttgagcagtttgatcattgcaattatccgcaaagattaataattcgaccttatctgctggatagtttaattcaaggattgcttgggtcgtctgcgcaataactactgcttcgttatgagcgggaacaacaatcgtaattaatggatatcgttttaatgggacaatatccacaatttttctactatgctcaagccaaaagtgaactgccccacctaatgtaatagatgacattaatagcgaactccaaattgagatcagggtcacaatcattacaaactcggtcattgctttttcctttccctttttacatttagtgttgtctgttcaacgcgaaaataaatcacccactgaagaaccgcaaatattaatgcctgaacaaaaaagatcatcgtaatcaccatcgccaaccaaaagaaaattcgtatcattatttctgaactcctcttagatactcaacgacaaggtctgtttccatatctcttttaatatgacgcattacactttccagattcttaaatgaagtcgcattaatatcatcaactttcaaatgtccccatttaaattgaggctttgaattattaatttgtaattcatcaagtcctgcacgtgtgctttggttctgataagcaaatgtaatatctggtaaatgatatgacaaaattaaaaaagtaccatcttctaaatagtacagggcttcagatggtaatcgtcgtcgttttaagactttcgcaatttgttgaagggcatagttataatcttgaggatgaaattgacgtatttgttgattatgaacccagtgaatcgctgtaacatcaatccataaatcagcaatctgttctttaataatgaattgaagttccttttcataaatcttattagcattataggccgtctgaagttttactatttgattatagtgggtcgcatagctttctatctccgcacgattgcggtcaagccagccccactcaccaataatgtaccgactgaaatacgccaaacttgcggtaattggaaaggcaaacagtaacattattttgattgaattatccattaccacataacctagcaataaaatggcactaccaatcgttgttaggccgattgcaagccaggttaaaataatatttggtactaagctccctaccattaagcccaaaatgatcataatcatcatggccgtcgtaataaaatgggcgtattgggatgcccaccacatcattaacacaattgcagtcaatattacacaaagcgcaataagccccgattctacaatatgtcgccgaatcataagaatgttctccctttcttcctataaattagcaactaatatcttagcacaccttttttagatttcactagtttaaaagcttggtaaataaggagttatgctttgtttgtaaaaataatttatcattttataacaagtaaattcccttgaaaaaattactcttttctatatttaaatttatagacattcatattagatatgttttatttttgtacgttgataagcaaaagcacaataattaaggtaaacaaaaaagcctgatttaactgtgcaggaaaaatcaggcttttaacttagtaaactcatcgatgaaacataacgttgctgatgttaattggataaagggatgcattgtttcaatgaagagtcttttatctaacttaaaaaacaagtggatttcttgtttgtaagtattatagcacacctattgtgaaaatgttaactaagatttaggatgattaaatatttttcgcaataatttcttatttatctactatttatcttattttccagcagtgattatcatcacaatatcacattatttctaattaaatttagaaataataaattaccttgtctgtctctgattaaaattctcctcggtattttatagataatatcattacttttatctaataattttcattatatctagttcattatattataatttagaaaaataaatatttttatgtgattggtgttaaaaaagctaagataagggtgataaataaattttgataaatttgtttaaaagaaatgaatttattattcctgatcacaccccatacggtcagcagcgatgattttatagctatttataaactactatttcattggattttatttatcaatttttatagaaaggagcagagttttttttactttgttagctaagtttaggggtatcatttgagttatttaatttactttatagctacttttcttcctttatcaaattgattaaattgcttggattcatatcactaatacttttaacctagtaattctcttttagcgtttctcattattcttagaagcttcttagaagcgctattgtttgatccaaaaatagaatattcattaatacgcaattacaaagcaatctctatatttaagctttctaatcaaaaagcaacctcagcgtcatcctttgacctcgagattgctttttatttgattactgatttccagttaatttccgacggactaacgttggatcagcctttcctggattcaattcgaccagtttccccgatccactgtaaataatccattctgctaagttaacaatatggtcgccagcgcgttctaaattccggataacggccaaatagctttcataggcttttacatcttcgccacctttaaccagtgctttcatgatttctttttgtaatttcacataaagtaaatcaactttcaagtcctcgttagcaacctcataggcaacctgctcatcagtatagacataagcatcaaggattcgttcaagcattttgcgaacaatcatcatcatctgttcaattggctgttcgatgtcttcatgatgttcaaatttacttaaggtaatcgcagcgcgggcaatatgggtcgaatagtctcctaatctttcgatatcagtactagcttttaagatactgataattttccgaaagtcggttgcaaccgggttttgtaatgccattagcttcaacgcctgtttttccaaatgaatttcttcatcgttaatctttgtatcagttgttaaaaccttatctgctaagtccgcatcatgatccgtaaatgcctttgttgcttgatagatctgctcactagcgtcaattcccatttccatgaagtggctccgcagccgttttaattcatcatcaaaaattgctcccatgttttcactcctaaccaaattttccgctaaggtaatccgccgtttgttgttgttgaggattcataaagatatctgtcgtctggttaaattcaattaattttccttggtgcataaaagctgtccagtctgctgaacgtgatgcttgctgcatattatgggtaaccataataatcgtaaatttctcttttaattgtactaaagtatcttcaatttgcgaagtcgaaactgggtcaagagcacttgttggttcatccatcaagataatttctggttgaactgccagcgtccgcgcgatacaaagtcgttgttgctgccctcctgataaggcgagcgcactttcttttaagtgatctttgacttcttcccacaaagcggcctgacgcaaactctcctctactcgttgatcaagaatttgccggtcctttactctggcaagccgtaatccataaataacattctcatagattgataaggggaacggtgttggttgctggaagaccatgccaatttgttgacgaatccggtaaacattaactttaggctggttaatattcaagtcatgaaaattaatttcacctttgaccgttgctaagtcatcgttcatccggttaagacttcgtaacaatgttgactttcctgaaccagaagccccaatcattgccgtaatcttattggccggaaatttcattgaaacatcatgaacaacgtgtttgtcaccatataatacttgtaaatttttcacttcaagagcaactgaattttccattcttttatcctcactttgcaagtcgttgcttaattaaataaccaatatatctagctaataggttaaagattaaaattgttagaatcaaaaccgctgctgaaccatttgaaacagcacgggcatctggaaccaatccctcactgttaactttccagatatggacagctaaagtttcggctggtcgtaatggatttaagaaactggtaggactaaatggattccaattggtatagctaattgccggtgaactctgcccggccgtgtagattaaggcagcagcttccccaaagatacggccagcacttaggatcgctccagtaataattcccggtaaagcagccggtaaaacaattttagttgttactcgccactttgacattcctaatcccaatccggcctgacgttgaagataaggaacttggcaaagggcgtcttcacatgcccgcgttaaaatcggcaagttcaaaattgttaatgctagtgcccccgcaagtaaggagaagtctaacccccattgcaaaacaaagactaagtaaccaaataatcccactactactgatggcaatgaactcaaaacttcaatcgccaagcgtaataagtttgtccaccgattatctggtgcatactcacttaagtaaatggcagcacacaatgctaaaggaatcgaaacgattaatgttaaaacaaccaggtaaagagaattaaataattgatcacgaattcccccaccacttctaaatgattcagcgcttgacgttaagaaatgccaagaaatatggggaattcctgatagtaataggtacgctaacaaggcaaataaaactaaccctactaaaccggttaaagttaaaataatcacggttgccaaccgatctactttttctggacgcattattttacccctttccggctaacgagccgcattaaaagattgaaggccaaggacattactaatagaattaaagctaaggaccagagtgcattgtttgagatcgtccccatgactgtgtttccaattccggtagtcaaaacactagtcaaggtggccgctgaatgcatcaatcccgttggcattaccgtcgtgtttccaattaccatttggactgctaaggcctcaccaaatgcccgggccatcccgaataccattgccgttaaaatcccgcttttagcactcggaataatcacccgcgaaatcgtctgccagcgagttgcccccagccctgcagacgcattgcgatattgtttaggaactgccctaaaactatcaattgtcatcgaggtcattgttggtaaaatcatcaaaaacaatacacaagtagcagcgagaatcccaaagccagtgccgccgaaaaagcgacgtaagaagggaacgattactgttaaaccgacatagccatatacgacggatggaattccgactaataattcaatggtcggttgaagaaacttatatgcggttgatggcaaaatctctgtgattgcaatagctactactaaggcaagcggcaaagcaattactcctgacaaaagagtaacgctaaaagaagtggcgatcatcggtaaggccccgaatacatgatcacttggccgccatttaattccacttagaaaatcccacaatgaatagtgattgccagtaaagagggcaattcctttccaagttaaaaagattaagatcgttgccactagtcccccaattaaagtaattgcaagataactaattactttccctgaggcttcctgcttactttcaaccgagggctgtgtcaaacgttgtcgtaagtcttccatcgtactatttcctttcagttactttcccagttggtgttttttcaactttcatatcatgaatgctaatatagtgagcttctgttacaagcgtcttttgaactttctcgctttgcatatacttaatgaaatttgcagttgattgggatggctgtttttgcgtatacatgtgctcatatgaccataatggccacttattagtcgtaatgttatcagcagttggtgctactccatcaaggttaactgactgaacttggtcattaagataagcaaatgcaatatagctgattgcccctggtgtatttctaataatttctttgactgtcccgtttgaatcttgttcttgagcatttactgcctgcatccccggtttcaataccgtctgttcaaacgcaacccgggttccactcccatgagcacgattaataactgtaattggcaaatcaggtccgccaacttcttgccaattcttaatttgaccagtaaaaatttgttgaagctgtttcattgttaaattcttaatgccaagttcttcattaacaattggtactattcccgaaacagcaacaatattatcatctaatttattggcattaattccatcttgctggtcagcaaagatatcagcagatccgatatttactgctcctgcttgtacctgactaaggccggttcctgaacccccaccctgtacaataatgctggtttggggatgcttagtccggtaatcatttgcaactgcttcagctaatggttgaagagctgttgagccgacaatggtaattttttcttgtgatggttgttgcttagcgagtacccatgacccacctaaccaacagactattgcgacgataacaaccccgataatcgtttttttcattactattcctacctgtttattagttgttttcatatatttcgtatggtacaaatagagaatagcaagtcgatgtaaatttttaatctttgtaatgtaaaggttatgtaaattttggagaaagtattatgaccaataaatttttgctaatgagccagcaagacgatctcgtccaccagttacaagctatttgtaaaaaagaacactggacctatgagctcgtgactactccgactgggttagtagtagccttagaaaaaaatcaaattagcggaatttggtgggatatgacggaagtaagcttagacaccacgattgctaccatgacccttattcggtcgcaagtccaaggaccgattaccgtttttactcctcgctttacggaacacattcaacgaaaattataccgggcacatgttgatgatgtaattgcattccctctcctccccagtattttccgctccttaattcagcagcgcttgtggacttaccactatccacagatgcattcattagctgatgataatacaaccaaaaatgacccagtaataactactggatcatgggaaattaatcaagaaacctatactgttactaaaaatgataaaacaattgctttaacacccaaggaatttcaattactttcttacttagttgatcataaaggacaggtattaaatcgggatcaactcgttaatggagtttggggatatgatattcttgatacttcacggatcgttgacattcatatcagtcacctccgcgataaacttgaagatgactcccaacaccctactcaccttctcacagtacggggatttggctataaatttgtttaaaatacccgaaatgtcaatttaagttagaaagaaagtagttgctcatcagtgacgtaggacatgaatacctcatatggagttcgatagcctagtgatttgcggggcaggttatttcgcttactcatcagttgggtcaccaattcatcaggaagattgcggaaatctagctgttttgttaagccgtcccggcgtaaaagaccgttgttgttttcgttcagccctcgttgattgggagcaccaacctcggcaaagtaagtgtgaaggtcaaattgattggcaatctcgcgccagccggcgaattcttttccgttgtcaaaggtaatcgatttgaagaagtgctgcgggaatttccgaagccactgacctaagtgttggttaatcgcatcagccgtcttttcgtgcacattgagtacaatttcgaccttcgattggcgttcggtcagggtcattaccgccccttggtgctttttgccttggacggtatcagcttcaaggtgtccaaattcagtggcatagtgcggaaagtccttggcacgctcgtgaatacttcgccccaattggccagccttcccgcggcgctcaatatagccattcgggtgccgcttacctcgcatgggcaaagcacggacatccaaaccgaactgcccccgttcaaacatccggtaaagagttcgccggttacaactaattgggcgctcagcgcgcccaataatggtgtcaggcgtccacccctgggcaattttgtcgttgatataagtaagttcagccagtgacaactgagtacgttttcggccacaacgttgcttattgcgcatatagtgatcttgataatcagcaattgaggcaccggtttccaggtaacgataaacgcgataaacggtttcggcgctacggttgatcatttgggccactcggtacgctttaagcttttgcacgaaagaatgggcgatgattgtcagctcgtttgtggtaagatgggtgtaagtcatttgtggtttcctttcttttgtttaggggtattcaaaagtctaccacaaatggcttttctatttttctaacttaattttacaaacggcgataataaaaaatgagcgcggctggaaaaaaactcctagtccaaaataaaaaccggatgatgaattttttgaacaattcatcatccggtttttatgtacacaggaaatcgttcctgatatgatgtaattatccctaaaaacaaccaaagggagcgagttccatgtatccaaattataccatagggcaaaccgaattctcactaaactataactatgatttaccacaaaatcatgttgcacgattaattagtgattttgtcgactcgattccacaagatgtgctattagaagattcagtagcggctaccggccgccccttcatcgcatccagcaattatgcttaagattctcttgtttgcctacgcacgccaaacttattctggaagaaagattgaaatgatgttggatgagaacctaccaatgcgttggttagcttatgattatacttatagctaccataccatcaataactttcgccgcagtcagcacgccagtaagctaattaaacatgcctttgtctactttaccatggttttgaaagatcacagactaattcaaaacgatgcggtttttatcgatgggaccaaggtagaagccgatgccaataaatattcatttacttggcgacgggcagttgaaaagtatcacgctaagttaagagaaaagacaagtaagctttatgaggaactagtagaaaagcaagtggtgcaagaaatggcaccggagctggttacttccgccgaaggcatggacgtaatggaacaagaactggcggagaaaatcactaagctagatggagagattaagcaagaaccaaaaatcatcaaaggtggttcagtgagaaaacggcgccgtcgttttctaaaaaagcttcgtcaccaattaagcaacgacctaattccgcgtgccaaaaagtatgaacgtgccgaaaatatcttccaaggtcgtaatagctattccaaaactgaccacgatgcgaccttcatgtgtatgaaggaagatccaatgatgaatcgggagttgaagcccggctataacctgcaaatcgctacccataagcaatttgtccttgattacgggctgttttcaaatccaactgacaccaggaccttagtgccattccttacccagtttcatgctttagatttctttgaacatatcgtcgccgatgcaggctatggtagtgagtacaattacacaatgattcttgatcggtttgaaaagtagccggttatcccatacacaacctatcaaaaggaccagaaacgtaagtttaaaaatgatccaactaggtcacagaattgggaatataacgctaatgacgactactacattgatcatcaaggagttcgttttagtttttattgctacagtaaatccactgatgagtatggctttaagcgtgactttaaactgataaacatcaactatcagttaaattagatgagctagcgaagacaccaggtggtcggcaacgctatatgaaggttaacccaacctggaattattataaagctaaagttaaagataccctctcaagtgacgaaggaaaggcaatttatcgtcgacggatgtccgacgttgagccggtctttggtcacatgaagagggattttggcataccccgaactcatctcagtggacaacgggctgtggaaaatgatatcgggctagccctgatggcattaaatctaacgaaatttggccaatcaattagtcgattgaagactaatttcataactaatttaaaatccgaactacgatttttggatcgatcaaaaatcatagtccggattttattgttagagaaccaagaattaatagttaattcccagcctcgttttattagtgtaatcaatttaatttatctttcatccgtgtgaattttagtaaaactaaatatactgttcaaccatgtttcgatactttaatagttctttttgccccatggaagaatcgggggagaacgacttgaacgctattgttgccaccattttcatccatttgctgacgtccccatacccctaatgacataatgagacgggcaatttcttgaccacctgtcgtgagaacaaaacaaccagcttctttaatcggactgattaagtatttggtttgtaattcctcaattatggttatcgattgattatcagaaatattagtcaataattcgtgtaaatcatcaaagtccagcggttttattcctagccaaaaaagaactttagagtaatcagcattacgcaaaaagcttaaagaataagtaattccatgattagcttcttgattcatcattaacccactcccgcgtacaaaatattgtaatattcatcacaaattataacatgaggaaaaagcaatctcaaaataaccccctatttatttatcagattattaatcttaaagacacttttataaataaagtcaatttatacaatgaaatcgctatcaataacattatattgtatatttactttttagtaaaatttgtgcctcttttattccaaagaaatgtgatttaggactactcatcttatgagcgatcaatatttgttgcgcttgttcacactgtacttttgctaactcatttggctggaatatttgcagatagaatgataattgccgtaatttaatcgctaactggctccgcgccttcgtcaaagtcacatccttaaactgcttataatcatgaatcatgaaacgagttttccggcgctgtaaagcatagttaattgaattgctcttaatccggtgaagatcttgaactgtgaggccgtgttgacgaagaagataattaaacatcgtaatctgctggtcgacttgtcgccaatccgttgcaatatcatctcgtaattgtgtaatctcttctttggtaagacggtgggtaactccttgttttaattggtgatataaggtttgcagatcttgataatcgcgttggtggagtggaaggtcaacctgactaaataagttgcatcgctggtaaaggatcgtcccttcgtggttcttaaatccctgctgggcaacaacaaactggaatatcttttttggaaaacgccgaccagcttgataagccaacagaatactatccatatacaggttaatttcattaatgcctgcctggatctccctagcaactttgtggggaatgcttgcatgctgctggaagtgagagatgcctaaaaatagttgccgaccagttgtccgtgaacgtaagataaattgattctttaaacgccgaccacaatcacaatagaggttgtcgccaggatgatcatgttgtcgctgataccaaggatcaattaccattccctgaaactcccaatcagtctgtttaagatagtgatgagtatgaaaacgcgatagcatcgcataacgcgtaaattcactcaatgcctgaacctggtctggccttaactgttgtaaaatatcttctcgctgttgacgggtcaacgcaatgattttgtccatcctctcattcctcccattaaaaatactgtattactatatcagaacaaatgtttgatttcaaattgtctatttaatccctttctggtaaaacatttaattacaaggagtgatattatttggatttagacatacagcccgtgaggttgagtttaaaagaatataaacaagttaaacaattatatatgcgcgcatttccgaaatatgagcgagaaccgtggacgtggctgctcatcaagagtaagtatcaacgcgctgactttatggccttttatgaccaggaacagtttgttggatttgcttacgttattcacagtcacggtatgcattatattttgtatctcgcagttaatgatcaaatccgttctcaaggatacgggacacggattattaatgaacttcgtcgcctttaccctgaggattcgctggctctggacgttgagcagcctaatcctcaagcggcaaataaccaacagcggttacgacgacttaaattttatcggcgcaatggctttttcccaactccaaagcttttcaaagaggaaaaagtcacttttcaagttttagcaaccaataaaaaaatcaaccaacgaaagattgataaggcctttgagtggttctcatggccgcttggttggctgattcaataaagattttgattttactagtttgaggctgttgaaaaagcttttttgctttttcagcagccttttttactgtcaagaaaataaggtttacaaaagtgttacaatttatgtaagcggatacataaagaagtgataacattggtagaaccattatttttaaagccagtctttcatgagaaaatttggggtggtcgacaccttgcaactgatttcggttaccaaatccagcgggaacaattggggagtactgggcaatttctggccatcctcatgggccaaatatcatcaccaatagtcaatacaaaggccaactattgccaaaagtttatcagcaacatcctgagctgtttggtaatccacgctcttctgtttttccattattaacaaagattcttgatgctaatgctagtctatcaattcaagttcatcccgacgatgcttacgccgaagaacatgagcacgaactaggtaaaacagagtgttggtatgtcattcatgcagaacctggagcttatttaacatacggccataccgcaaaaacgcgcgatgagcttattaagatgatcgataatcaccaatggtcaaaactttttagtagaaagccagtaaaaacaggggactttgtctatgtgccaagcggaactatccatgccttaaataaaggaattatcgtcttagaaacccagcaaagttctgataccacttatcggatctatgactatgaccgtcgagataaaaaacaggtcagctacgccagcttcatttaaaacaagcaaaagacgtgacaacagtgccatttactgagccacaaattaacccccgcatcgtccataatgatagttcaataattactactttaatttctcaacctgactcaccattctttaccgtctacaagtgggagatcaatgattaaaccagcttgacctggtaaagaaattgggcgctactgaaacaattaataacacggctgaagatcccgtcaaagcaattaaggaaatcgttccgcgtggtgtaacttatgcaatcgatactaccggaaacaccggtgtaattaagtcagcaattgatagtcttgccaccgctggagaatgtgtcctcttaggagtttgcggcgatattaccttaaacttaatgaatgatatcttatcagaatctaagaaaatctctggggttgtcgaaggagatagcaatccccaagagtttattcctcaactagttaagtactacaagcaaggcaagttcccccttgataagcttgttaagtactacgattttgctgatattaaccaagttatcgctgactcaacaaacggaaaggttattaagccaatcatcaaaattgatcctgaattagctaaataattaggtgaagtgtttttatgaaagtaatttttgtttgccttggtaatatttgccgctcaccaatggcggaagcaatgttcaaaaaaatggttgcagaagctggccttgctgatcaaattactattggttcagccggaacaagtaacattgcagaaggttcacctgctgatagtcgaacaaaagccattctcgataaatatcacattaaagacgacggaatgattgcccgtcaattgcaggacagggattattatgatgccgattatattatcgcaatggatcagatgaatgtccgggacgcaaaagatatggcaccagctgggttagaaaataaggttcatggaatctttaaagctaccccaggaaaagaaaattgctatatcgttgacccctggatcactcaccgattccaagatacctatgatagcttaagtgaagctctccccaattggcttgctaagctaaagaaggaaattaaataactgtttatcaaaaaacacgcctgaaaatttcagccgtgttttttctttttattggtaattaagatcgtcaaacttcttatcagcgttttgttgtgccatatcctttgattggtagtaaacagcatctacccaatttccggcacccccggctgatacaagaactttaacctgctttccatcgattgtttcggtcttaacagtatatgatgaaccgtcaccggcattttgaacccaaccacggatatttaaccatcgtgatccatccatgttaaagaaactggctttcccccagttcttagtagcgttttggattccttcgttagtatagttatcctcgtcttcaccccactcagaatcctgtttaaagagttgagttgttgtactgctattctcaccactgtaggtaaaggtatgaggaccaaatgttattgttgaatcagcatcattatctgccgaataccatgttccctgcatttcacttggaacatcaatagtaccactgcggccatacttatgatcattgccagaattactggtgcttgctgaggaattgctatccccactgcgcttatcgactacctgtgccttagcagctaagtcattaacgagctttccctgaccttcttgattaacataattggccatttctgactttgagattgtggcgagtttagtactcttttgattttccttgacattttggtagatgtttacatcatcgttattaacagtgtaaaccaagccctgtgactttccaccagcagtcacatcgtaagctactccttgtcctccatcactcaattggtatttagaacttgggtaaagatttacctgcaatccctctttttgcgcttctttagccatggcagcccaattcccaccataacgaaggccacaatacgtactaatcaaactaacagcttcttgggggctcatgttatcactattaactttcacattacttttagccactaataaactactgcttgaggcagatgaagaattagccgctttattgttagcctgatttccacaaccagctaataataggcccatccccgtaaccattaaaaatcctatttttttattcatattaatatactcctataaaaaaatgaggctggagaaaatttttgttttctccagcctcaactgtttttatgaacaatagtaagataacatggaaaataaccacaaggctcaagtcttagtacggacgataatcgccgtcttagcttagtccaccgccttgtcgagggggttatttcccacttgcatatttaactaagcccgtgacttgtagctaccatcagtagtgttgatgattaacttgtcaccattcttgataaatgcaggaacgttaacaactaaaccagtttccatcgtagcaggcttaccaccaccatcgatagtagcacccttaatcattggttcagtttcagcaacagttaattcaacagtagttggtaattcaacaccaatgatgtcgccgttaacaaagtttaagataaccttcatgttttcaacaaggtagttcttgtcgtcaccaagcaagtcatggtttaaactgtattgttcgtagctttcaaggtccataaatacggctgagtcaccttcatcataaaggtattgagcagaacgcttgtcaacgttaacttgttcaaccttttcagatggacgcatagtagtatggacaattgaacctgaacggaggtcttggatgtccatttgcattaaagtgttacccttaccaggcttgtggtggttgatttgaagaacctttaataacttaccgtcacgttcaaaaaccataccttttttcaaatcaattgtttgaatcatagtataaaaactccttcatataaaactgaactcttttaccgattaatgggactttgctttaaagcaagccttaatctttggcttcgttccgtgccgttaatcatagatagttaccatctataatttacattcactgtctattgtatcacattccctaatcacaacaatagcagttgttaggatgttttatcaataaaaaactgtctgcctatttcataattttcaatagacaaacagcttttttctttgatcgatacttctaaaccagctcaagatgtaattgcttttcaccgatgaatccagcgcgcttaagaacaaggtaaagagcaattgaaagaacagcgggtgctaccacgccgaaaaccatgtatgtgctgaactgagcccagccgcgtgataagtaagcaattggtgcaatcaaggagtttagtcccaatcctcctaaggtcgatgttgaacggaaatcaaacagaactgttgcaattggtgcacaaacagctgctgaaacaaccgttggaactaaaagataaggattgatgaggagattgggaaattgaactttaggggtaacaagtccttgggcgatatttgcgccaaggttattttgccgaaatgacatcgcagtaaaaccaacaaattgagcagtagtaccgatcaaggcagccgccgaagagatcggatcaagcatcaacgcaacggccaaggctgcagaagaggcaggcgtcatcagaaatagggcccacacaacggaaattaccattgatcctaaaactggtgaaacttgcatcgaatgcgcaatgtaggcggacacagcaagaagcgccggcgtaacaactgccgcaacgactagaccaaaaccgatccccacggctaacgcaccaaatggaacaagaaccatatcaagtggcgtctttccagttaaatacttaccgacaagaacagcaacaagtgccgctagaacagcagaaacaggttggccagtagtaagaaccggtgctcccgctgccgccgcagttacttgccctgttgcagtcattcctttaaccgccgtatcagtaaaatgaacaccatttgatccaacggtagccgctaccattgatgcaaatgtaactaatgtatttgtgttcatctgtgaagcaaccgcaaccccaatagcaggcgctaataatgcttgagcctcaccaccaattagggtaaggacatggatacctgtcaagttaccaattgtttgagttaataatcctcctcctagaacgaccaaaatagcattagccaccgccgcaaaaattcgataggccacttccttgacctttgatgaattttgataagttgcattagctttagaattgctaactcgattttccatcattaacgcctccttataatttgtttttgtttaatgattgttgttagtttatcggagcgaaaattaaaagtcaattatatttctcatttatttttaatttaaatcaagaaattgtttttattaaattctttacgatcgtcacatttaaagtaagcgcttttgtaaatgaattcttaagaaatcataaccacccgtcaaacgggtggcttgcacataggctataagccgataataaaagccggcgtctcaaggcgctggctttcgctttgctcaagccaaaatgctctgactactttgccaccgctttaagcggtgtttatactacctcacttacccttaaaagggtccgaatattccacacttgttagcttatccattgctatatcatgtttctcttgatctcggatatgcttctttatcgtggattcattcaatccaactgtacttatatagtagcattcagcccaaaaatgtcggttcccatatttatattttaagtttgcatgtcgatcaaacatcattaatgcacttttctcttttaagtatcccataaactactagacacttagcttcggcggaatacttactaacaagtgcacatgatctggcatcatatgaccttcaattatttctactctcttatatttgcacaataaacgaatataatctcttaggtctcttcagtattgattgaagatcgctttacgtctatactttggtatgaatacgatgtgatacttacataaccacttcgtataggctaagctatttaatttattagccatatttatataacctcttttcccttattgactttggcttgaacacctacatcttaaggcaaaagaggccttttttatataatttttatctcccacccgcatagcaggtggttttttgtttcgtgcactcgctctgctcgcgcactcaactaggtctaaagacattaataatcatagccaccatttgtggtagtagtggctgttgttgcaacaatcttattttcttgaattgcttcattggcaggggtgtcagcagtatttacattgaaagtaagaaaagcatttttattttcttcttcactattagttttatttacagaagaagcggaacttgaattttcagtagcctgagcagttgtagtcttttgttcactggttctagaagtgtcagtagtattagctacaatatttatcttcgtttcagcagtatctagggcagtctcatcccctgaattttgcggttgcgccgattcagctacaataccacctgcttgcgttgttgctggggtagtcgtatctgcttggacactagcatttactaccccagttggcccaaaagccaacataaaagtagcacaggcagtaatccactgtttcttcgccttatatagtttctaattcttatttttgggagtcatactccgtaaaggattatttttacccataagatctcccccgtctcttaatcatttatccatctataattataatccaatacaagttcttttaaattaattttttatcatcctattaatttaaaggtcaacaaaatttatccttggcattgttaagagcaaaattaataaaaaaacgaatggtcgctttacgcttaatcccatccgctaccacaatacattagtcattgcttttcgttgtttctttcggttgcttctttgcaaataagtgatacacgagtcgggcaaccagtgcttgtaaaacaatcgttactacgctttgtgcaagttttcttacccatttcataattttagctcccttacttaaatcatgccttgtagttaaacctaatcttctattactttaattatactcgtttcttattaatttgtttaatagaagtctttatcttaagattagataaaattattaattttcataataatcttcaattcatcaatataaacgcacaaaaagccctttttattcgataattgagaataaaaagggcttaaaattaccacaatgttgtcttttggctaattataattttattattaattttctagataatttaatggcttatcaacattcacctttgttccttgatactttttagcaatccattgttgaatttgcttattatggtaaagcttgactaacttcttatattctttattatcacggttcttcttagcagttgctaaaacattaatgttatccttcgtgctttgatcaactttttcgtgataaatagaatctttcaacacatttaaatgaccagttaaagcaatcgtattaccgattaatactaaatcagttgactttaatactcgtggtccggtggtatcatcaatttctttaaattgaaggttctttggattagccgcaatctcattggttccacttgttgccccaaagcccggcttcaattttatcaagcctgcactttgtaagagcaagagaccacgcgccgtgtttgctgggttattagcgatcgcaactgtggcaccatctggaatgtctttaacactcttatacttatctgaatataagcccattggttctaaataggtagttccaatcgccgctaattgtgctttcttattttccttattataagcttgcagatatgaccatgattggaaagcatttacgtcaatttcaccactagcagtcgctcggtttaaagctacgggatcagtaaagctcttgaccttaatcttcaaaccttcacttttggcctgtttactatttgcaatgtgttgccaaacctggacatctgggccaatcgttccaacagtaatctcatcgttgcgggtaaacccaccattagcgcccacactaagtccagctgcaactaaaatcactactacaataccaacaatccaccagccggtacgctttttctttctcatcataactacccctttacttttgttttcgctattcgtcataactagtcgcaatagccaacgggatccgacatgtcgttattctcgagaaatccttagtcagcgtttaccaaaattattattagtcaaccacgtggcgttcaaatggcttatctgaaatcccttcatcaagaatcttctttgaccattccttagcagagaataatgaatgatcacggtagttaccgcaagattcaatcgttgttccctgaacatcttcccacttagtcttgtaggcaatttcttcaagtgaggacttcaaggccttggcaacttcagtagttgagtgttcaccccacgtaattaagtggaaaccagtccggcagccaaatggggaacaatcaatcacgccatccaaacggtcgcgaagcaaaccagcaagtaagtgttcaatcgtatgtaaaccagcagttggaattgcattttcatttggttggactaaccgtaaatcatagttgctaatcttatctccctttaccccttcttcaacggtaattaaacgaacgtaaggtgccttaacctttgtgtgatctaatgtaaaactttcaactttagccataataaatctctccttttctgcctgatgagaatgaatcttggaactaaaaaatccctaggaacggcaatccaaccaattcctagggacgtttaatattcattaacgtgataccaccctaatttagccttatctcacaataagacccgcaagaagtacataaaaatactccagcacggtaacgggtgctaatcgcttgctgctaacacgtatgctcacagcatcagtctgctccaagaccatcttcattattcgttaccatactggttctcatctttcctagctctctgtaatggcattaaataattactcatcttttctaagcaatttctaatttaattgtaattataatatccttatccttactaattgtcaacacctatttcaaaattattcatgatataacgttcttaacgttttagcatcatttttagttattccgtttttgatgtttcgtgggatcatcacactatgctcatattctggagcgtgagccaatccaagggcatgtcccagttcatgttgggcaacctcacttcgaaattctttattagtataatctaactgattagggtccaaagttaaagttgccttatgcaaggtattcgtagtcggatcatattccgtccgggttgagccgagttcagatgttgtatagccaacaccattgtttcccgtattatttcgtgctagatcaccatcagccgcaataatattggccttatcttcgttcttagtccagcggatatgaactgctttcgtcttattccattttttgaccgcatcacgaaaagcccactttaattttggatcagcagtttccatgtaaatagtaatattctttttcttccacctaaatccttcaagcggtgtcggtgtattttctgggattcttagccgttctgcatttggtcgttggccgccattagaaaactgaaaatcattactatcagaagaatcctgactaaaaaatgatgattggaaaggttgggaaggcgcatctacatcagcatagacatgataatcgctaattccaaccgtccccacgactaagagtgctactaaaaatcgacgcatttaatcatccccattccataaagttagaaatgacaacacggttcgaggcgttcttgccagaaactaacaatccagttctgggagaaaaagccgatcaccgttccaatattaaaagcaaagattgcatgatttttaagagaacataacaagataatgataatgggcaaaataatattaaattacttcgtgaatttaagactggcgcggcgctttaaatagactgtcaacttatcatgcggttgaaaacaacaattacactgttgataaagggcatacccggcaaaggcaatcactaagccaagcaggttaaaaccaaagcgcagaaaaatgttcatcgtatcaattccccaaaatcgccataagttcgcaaatagttgcatgaaaatactgtacggaactaaaaatgttaactcccagccaaattctttaggagcaaattcgccaaccaaaagaatatgtagtcatcgctaaatatcccagcgtccaattatgttcttcttctaactctacaatcgcttcaagtaactctgcttgctcattataatatcgacttggctttcgattgagccatttgtaataaccatctcgcgaagaatcagctattttacacaactggctaattgaccatccattttcctgatttagttctttgatcgcttggtaccggagtcctttttcacctcccgattgcgtatttttgttaatttttttgcgaacgcaatctctatcttttgcttttctagctgagcccttaataagcgattttctgccttgagtcggtcaacttccgtccacttctcttctggcttagctttgcctcggcgatcacgaagtgattctgggtcattaccgcttttgcgatacttttgataccagccataaatctaatgcctcatctgtttgttgatattgttcaaccaatgagtttttaaattctttagagtagctttgattatgatgacttgcttgaagtcctggcattccctgatacttgtatagaagactccaccgcctgatagttttttggctaatcttgtatttaattattaccttatggattccatttcgtaaaacttcattgaggattaaaaatttttcctctgccgagtatttagattttcttcccatagaaaaagccctccataactacctcggttgtcttagaaaggatatattcctcatgactaatgatatcaacttttggaccggaatcaaggacccttacttaatcacctacactgttattctcggcgtaacttccaatatcactggttatccaatcaagaagtcgtcgaacggctacccgatttctctccagatctaagggttactatcaagacttaatagccacgattagtaaccgcagtcaggccttgttagatcagttaatcaagcggaataatttaccaagtgcgatgcgacgagttaagcgaacccttgccaagcaccgccaggagatcattgccagcttttacatccgactaaccaacgggcctatcgaaggcactaataataaaatcaagataatcaaacgaaccgcatatggctatcgtaacttcttccattttcggattaggattcttatttcgttgaagacttctaatctcatgattcgtgaattatcaaaaaagagaactagaccaaaagccaaagtagcttagtctagttctccaaattctcttcatccttaccgattgacaaagagccagggttcatggtatggtttaattatcaaaattaaaggaggtcatcatgatggctgataaggtaatgacgagggatgaactagcaaagtacaatggccaagctggtcaaccggcctacgtagcagttgaaggtgtaatctatgacgtctctgctaacccggcctggcagggtggccgccaccatggaaacttggccggtcaggacttgaccgacgttttgcttgaaaagtcaccccatggtaaacgggtattaaaggatctgccagtcgtcggtagacttgctgaatagaacaccaaaacagctgcggagggaaaatccacagctgttttttatataacaccgtttgtaaaattaagttagaaaaatagaaaggccatttgtggtagacttttgaatacccctaaacaaaagaaaggaaaccacaaacgagctgacaatcatcgcccattctttcgtgcaaaagcttaaagcgtaccgagtggcccaaatgatcaaccgttgtgccgaaaccgtttatcgcgtttatcgttacctggaaaccggtgcctcaattgctgattatcaagatcactatatgcgcaataagcaacgttgtggccgaaaacgtactcagttgtcactggctgaactcacttatatcaacgacaaaattgcccaggggtggacgcctgataccattattgggcgcgctgagcgcccaattagttgtaacctgcgaactctttaccggatgtttgaacgtggccagttcggcttcgatgtccgttccttgccgatgcgaggtaagcggcacccgaatggctatgtcgagcgcagcgggaaggctggccaattggggcaaagtattcacgagcgtgccaaggactttccgcactatgccactgaatttgggccccttgaagctgataccgtccaaggtaaaaagcaccaaggggcggtaataaccctgaccaaacgccaatcgaaggtcgaaattgtactcaatgtgcacgaaaagacggctgatgcgattaaccaacacttaagtcagtggcttcggaaattcccgcggcacttcttcaaatcgattacctttgacaacggaaaagaattcgccggctggcgcgagattgccaatcaatttgaccttcacacttactttgccgaggttggtgctcctaatcaacgagggctgaacgaaaacaacaacggtcttttacgccgggatggcttaacgaaacagctagatttccgcaatcttcctgatgaattggtaacccaactgatgagtaagcgaaataacctgccccgtaaatcactaggctatcgaactccatatgaagtattcatgtcttacgtcactgatgagcaactattttctttctaacttaaattgacatttcgggattttatcctccccaaacgtaattgaactactcccacttagctaaacctacggtttaattgcttgaagtgggagattctggaaacatcgcatacttaccctaccgattctgaacgaaccttcaagcagaggttacgactattagccaaggctcgtcccgagcctaactttatctatcggatagctaatcctttttgcaagatgacttgtgcagcgttaatatcacgatctaaatgtttaccacagtttggacaatcccactcacgtaccgctaaccattccgatttattcaatcctaaccgatgattattcttcccacaattagcacaaatttggctagtatatgacggattgacctgaataagctttttaccgtaccactcacacttatattgcaacatatctactaattttgaccagctagcgttagcgattgctctagctaaatggtgattcttcatcattcccttagtattaagtttttccaacacaatgatgtcgtactttttgaccaatttagtagtgaatttttgtagctgatccaaccgttggttggcaatcttttgtcgatacttcgccaccataatacgagctttctgataattcttaaaatcatctaattgccgtggaactaacactttattatgatgatcccaggcgatttcctgctgagcctttaagaaccgacgactacgcaatttctcccaacgatacaactttttatggtatttgtcttcaaaatgattgatcggttccttgcatccatctgaaagattaagtaatgacttaagtcctaaatcgccaccaatatatttacttgttttaggaagagtttggttttcgctttccactaaaacagtaatgtaatattgaccagcaacgttcagacgaacagtgacattcttaattttacccattggcaatcgaccagctctaaaatagacgataccgagttttggtaattttatatgatggcaatctaaaactttaatattgccattaacgtactttgaattgtagctctgagaatattttctggatttaaatcgagggaacttattttgacctttaaaaaagcgttgaaaagcatcggctaaattgcgattagcactttgcaaagcagttgattctgcttgtttcaaccaaggatactcaaccttaagttgtttcaacagattattcatcccaaaggcattcacaaatttagcttccggattattcttgcgccgttcaatttgcatattaagcatttgattccatacaaaacgaacacaaccgaaggtttgccagagctgatttcgttgtgctgaatttggatagatgcgcattttaacggcttttagaaccattattttctcccttgactttcaatatatcgttttacaacttctaaaggcgctccaccagtgctaattaagcaatagctttgtgtccaaaaggctgatttccaaagatattgcttgatttctggaaattgttttttgaccattctggagctagacgatttgtaagcatttaaaaatttagccatttccgtatgaggcgttgctctaaacaaaacatgtacgtggtcctgatcatgattccattcttgcaaattaatgccgtatgcttgtcccacaactacaaaacgatgtttaagatattcagatatttcatcgttaattacttttcgacgatacttaaccaccattaccaaatggtaattaagtaagtatactgaatgctgatttctatctaattctattgttatcaccacattttatagatatatactaaatatatcatagaacaaaagaaaaagcactaacgcgctttaagagagcgattcatcccctacttatagaagtaggggtattctcgcaaatttatggataaagaccagaaagaatgcttccctcttctttccagtctacctattaatcttcaacttttttagcgtcgttcattgccttcatgatagaaggattctttgaatgacaatccttgatcatttggatatcttcttcacttaattcaacagtgtatttagccatgatcttccctcactttacttaaaaaattacacccttactatatcacatcacaggagcagtgtctggcttaatcagtaaattaagatcattaattgacattcaactgagatttgctaagattaacattgaattgcataaacggggagcttgcagacaggctgagaggggactatgcgtctcgacccaatgaacctgatttggataatgccaacgtaggaaggattaataaaggacgaccaggatcaaagtgattactggtcgctttttactttgcactatcttaatcaaatcaaacttaaggatggtggaattatgcaacgacagacaacaattatcgaaaacagcatgatttggtgtggcgccgggatttcaattgctgaaatcctaactggaacttacttagctccccttggttttacaaaagggatcgccgtaattatccttggccacattatcggctgttttctgctctttttagctggaattattggcggtcagcaacgtcttagttcaatgaacgccgcaaaaattagttttggccaaaatggcagtaagttttttgccctattgaatgttctccaattgatcggttggaccggcatcatgatttatgatggtgcattagcagccaatgggggctggcaccttaatcaggcattatgggtcattttaatcggcgccctgattattggctggctgctcgtcggggttcggcacctttattaccttaaccttgcgaccatctcaacattattaattctaagcggtctcctatgcgccgccatttttacccaccattctaccagttcaccaactggtacattgtcatgggctcaggggatggagctagttatcgccatgccattatcgtggttgccacttattagtgattacaccagtgttgctcaacgacccgtgccaactagcgggattagtgcagttgtctatggcctgactagttgttggatggccttcatcggtttaggagctgctatccttactcatgacattaacatcgccacgattattttacgggccggcttgggaattgccggtttatttatcattattttttccacaatcacaacgacatttatggacgcttattctgctggtgtttcttcaaaaacgattttcagtaaatggtcaggaacaatggccgcaattggtgcaacaattctaggaacaattagtgcgttgattttccccatggacaacttcagtaattttctttaccttattggttctgtctttgccccaatgattgcaattcaaattacagattacttcatcttgaaagtagattatcgtaaacaaaattgtcaatggactaacctaattctctggttgattgggtttatcatctatcgaattctgctaaattattcatttccactcggcagtaccgttaccacaatcattatcatcatcgcaataacctggggtacacagcaagttcgcaatttggtcaaagtgaaataattatagttttcctactaagtaatagtattattaatgcaattacaaggaaggaattacttttatgaaaaaaatagttgctaaacaagtatcaatacttgaactcttctatgatttaatttttgtttatgcgatctctcgaataacaatgatgattcatcatccaatcgatggtagcttgccgccaagaatatatattgaatttatcattgtcgttatcttcgttttacaaatttagctttatcagacagtctatattaatcgctttggaacaagtcgggccgtcgatacggttggcttattgattagtatgtttgccgccatctatttagctaataatattaatactgaatggcggttaacatttcatgcgttcaatctttcggcagcactaacaactattaacttaatctttcaatatttatttggctctagcactcattttaaacgagatcatgatctccaaggatttattattgcgcttggcttagaatttattcttcttgtaaccgggctgattattggttatcagtatggtgtctatctctgcgttgccggtggtttaatcggctttttaatgcccttagtgatgtaccgcatgtttaggccggaacaagtcaactttccccacctcgtagaacgcctaagtttaataattatcattacgttcggagaaacacttgttaacattacccattactttaagggcgctatctattcaccattagcaatcgcaatctttctaggagtagctgccctattcggcgtctatacattgctagtagaacgcttcttaaatcatcatcagcatactcgcggctttattgcgatgtacactcatgtagtaatgattatcagcctactctcgattacgactaggattatctatatggctgatgaagaagtatcacgtttgtttcttagttgctttgtcgcatctaacctcatcgtcttctacctttgtctctggctttatagtttttataatcgccgccatttacgcgttaatggtcgagatcttagggcaatggcgatcgtccttttactaggatcacttggcattattttatgtcgcgaaaataacctaagtttgatgagcgcatttgcgttaaccaacgtggtcgaattcggcttgttggaatggaagctgcaaagaaaaaaagccctctaaggagcctcacaacaactattcatcacataattagttttcatccgcatttatattccatttatcctaataaccatttagggcagatggaatttttattcccgaaatgtcaatttaagttagaaaaaaagtagttgctcatcagtgacatacttcatgaatacctcgtaaggtgtttgatagcccaatgacttgcgaggaatgttgttccggtaactcattatttgagcaacttcttcatcagctaggtggcggagatcgcgacctttgtggagcccatcgcgccgcagaaggccgttgttgttctcgtttaacccccgttggttaggtgcccccacctcggcaaagtaggtctggaggtcaaattggttggcaattgctcgccagtcagcgaactccttcccattgtcgaaggtaatcgacttgaagaagtggggtggaaactttgccaaccattcctgtaagtgctggatcacactggtggccgttttactatggacgttaagaatcacttcgactttggaagtccgttctaccaaagtcataacggcgccctgatgtcctttgccctggacggtgtcggcttcaaggtggccgaattcacggttaaagttgggaaagtcgatagcccgttggtgaatgctttggccaagttgaccggccttcccccgccgttctacgtaaccattggggcgacgcttgcctttcatcggcaaggtccgcacatcaaaattgccccgctcgaaaaggcggtaaagcgtccgcatactacagctgagtggctgttcagcgcgtcccataattgtgtctggcgtccagccttgagccactttggctttgatataagttacctcatcagtgggcaattgaatagccttccgaccgcaatgagccttgttttcacgatagtgttggtaatattcttggagcgtgtggccggcggccagaaagcgataaactcggtagacggtttctaagctccggtgcaaaagtttggcagcccggtaggcttttactccttggtcacgaaaattagcgatcatcgttagttcgtctatggtaagatgatggtaggtcatttgtggtgtcctttcttttgatgtatgggtattcaaaagtctaccacaaatggctttttatttttctaacttaattttacaaaccgcgattttaaattcagttcaaatcccatatgtttattgtcaattttgtcatcaatataaatcgtaccgcgttttataaaaccaatatcttggcctattttttgaacaggaatatttttgtaatgagtatcataacggaaattccttactccttgcaaatacccaaccgtaagtagattggagaagatatatttcccaaaaccttgaccattgtgggaaggaagggctgctaatcgatgaatgattgcatatggctcattttattttaaccacgatccatctttaatctcttcatacgtttgttccggggttagttgtaaggtagccgtcccaacaattttttgattatcaattagcacccagttatagccagctttaatatcattttccatcgttttctggaaaggatgaccatcttgccattgtggattacccttttcttttaattgtgctcgtgcctgttcaataattgtcatcacactttgaagatcatccaaagttgctcgtcgtaagtaaattgccattatcttttctccttaatcatctctcactcctaacaacaaaattctaatatattaatgtatggtcattttatcacgattaattattaaactgatggggctttagctaagtttaagtgttttgtcacagcgttttcattttaaggagggaatctcatatttatccatattgaactactcccacttagctaaacctacgatttaatgcttgaagtgggagattctggaaacatcgcatacttaccctaccgattctgaacgaaccttcaagcagaggttacgactattagccaaggctcgtcccgagcctaactttatctatcgatagctaatcctttttgcaagatgacttgtgcagcgttaatatcacgatctaaatgtttaccacagtttggacaatcccactcacgtaccgctaaccattccgatttattcaatcctaaccgatgattattcttcccacaattagcacaaatttggctagtatatgacgggttgacctgaataagctttttaccgtaccagtcacacttatattgcaacatatctactaattttgaccagctagcgttagcgattgctctagctaaatggtgattcttcatcattcccttagtattaagtttttccaacacaatgatgtcgtactttttgaccaatttagtagtgaatttttgtagctgatccaaccgttggttggcaatcttttgccgatacttcgccaccataatacgagctttctgataattcttaaaatcgtctaattgccgtggaactaacactttattatgatgatcccaggcgatttcctgctgggcctttaagaaccgacgactacgcaatttctcccaacgatacaactttttacggtatttgtcttcaaaatgattgatcggctccttgcatccatctgaaagattaagtaatgacttaagtcctaaatcgccaccaatatatttacttgttttaggaagagtttggttttcgctttccactaaaacagtaatgtaatattgaccagcaacgttcagacgaacagtgacattcttaattttacccattggcaatcgaccagctctaaaatagacgataccgagttttggtaactttatatgatggcaatctaaaactttaatattgccattaacgtactttgaattgtagctctgagaatattttctggatttaaatcgagggaacttattttgacctttaaaaaagcgttgaaaagcatcggctaaattgcgattagcactttgcaaagcagttgattctgcttgtttcaaccaaggatactcaaccttaagttgtttcaacagattattcatcccaaaggcattcacaaatttagcttccggattattcttgcgccgttcaatttgcatattaagcatttgattccatacaaaacgaacacaaccgaaggtttgccagagctgatttcgttgtgctgaatttggatagatgcgcattttaacggcttttagaaccattattttctcccttgactttcaatatatcgttttacaacttctaaaggcgctccaccagtgctaattaagcaatagctttgtgtccaaaaggctgattcccaaagatattgcttgatttctggaaattgttttttgaccattctggagctagacgatttgtaagcatttaaaaatttagccatttccgtatgaggcgttgctctaaacaaaacatgtacgtggtcctgatcatgattccattcttgcaaattaatgccgtatgcttgtttcacaactacaaaacgatgtttaagatattcagatatttcatcgttaattacttttcgacgatacttaatcaccattaccaaatggtaattaagtaagtatactgaatgctgatttttatctaattctattgttatcaccacattttatagatatatactaaatatatcatagaacaaaagaaaaagcactaacgtgctttaagagagcgattcatcccctacttatagaagtgggggtattctcgcaaatttatggataaaattaaagaacaaacagcaacaggtttaaccgaattattggatcaagctcagttagaaaaagatgacctcgtagtgttatgtctttcaactagtgaagtccatggcggaataatcggaaaggactctaacattgagattgcctgggcgattgtttcgacagttgttaatatcttacgaaaacaccaactccatttagcagtccaaagttgcgagtaccttaatcgggcacttgttgtcgaacgaaatgtagctaaggagcgcggctttgagcaagttactgtcttcccttcgctccatgcaggtggtgcaggacaaattgctgcttttgaaaactttaacgattcgattgaagttgaacacattactgctgaagccgacatggacatcggtgatacctcggttggcatgcatgttaagtttgtccaagttccagttcgcacttcgataaaacaaatcggactggctcatacgacttatctccgcaaccgaccaaaattgattggtggtgcgcgcgcaaaatacgaatgggatccgtttgacaataaataattttaattatgaggctgcgagaaaactttttcaacagcctctttttttatacgaatcttgttacgatatcgtggaaatccttgtagactagctttgcattgtagccatccttgcgggagtgggactaaaaactcgcaagcaagtttaattctattccctttttcgttcaattatttaactttccgattacccaattcccaaaaagcgagggccgaggcagccgccacatttaaggaatcaacgcctgtagccatcgggatcttaattgtaaaatcactctgcgtaattgtattttctcttaatcccggcccctctgaaccaaggataatggctaatctatccaccttagctaactgaggatcatcaatatcaaccgtgttatgacggagcgccatcgcggctgttttgtagccagctcgatgaagaagatcaactccttctgactgccaaactttagcatcaacataggtccacggtacttgaaaaaccgttcccatagctacccgtgaggcccggcgataaaggggatcagctgagttgctcgttacaattaccccatcaattccgagagctgcggctgagcgaaaaatcgccccaatgttggtgggattaacaacactttccaggattgcgatacgcggatggtcactgggcatagtagccaaaaaattatttagacttggccgttcgacgcggtacatagctgctaatgctcctcgtaaaagattataaccaccaccagccaactgccgaagtaatttactattaactacataaattggcgtttgttctaatcccctagtttggttaattgccatctcatgatccaaatcagccaagtcacgctctagttccttttcttctattaaaagagatgctggccgataacctgctcgtaaagctcgttcaatcactttgggactttccgcaataaataaacccggattaggttcaagagcatgaaaaagttgtgcttcattaagtcgcatataaggatctaaatctgatcctgtaagatctgtaagaaaaattaaattatgcatattaaatttaccttatcttaaaaactgaattagtttagtatactcttattttcgacctttttcatgacggttattttataacgagtttcgtttgccgatcgggtaataaaatcacgttgaatcaaaagagaaacaatcattgctaaagcatcaataattatgaaaacaattaaggtgacatagtaattgtggagaacttggtgtgtgtaagaaagaagaaggggtcccaccatcccagcaattgcccaggcagttaagatatagccatgaatagctccaagttcttttgtcccaaaaacgtcaccgagatatgccggaatcacagagaatcccgccccataacaagacattaataagcacaacgctaatgcaaagataaatggcgccttaaataaaagaagaacaaagagcatcacaatatcaagaacaaaaatcaaactataggtaagtggccggccaataaaatctgataaagttgcccaagctagacgaccaaaaccattaaatagaccaatgataccaaccattacggcagccgcactcgctgtcattgtcgtcatgtcctgggccattggtgaagcagctgaaactagcccaattccggtagtgatattaataaaaaacataaaccataggaaggcaaatgtccgtgtccgcaaagcctgattagcagttaattcgcgaccagtcaaacttatccgttcagcattcttagcaatcgctggagggagttcatgtgatcgtggcttcttgataaattgggcagcaaccagcattacaacaaaataaaagcctccgagaatgtagaaggtatttacaacgccaacgttcgccattaaactttgcgcaattggccccgtaagcatcgctgcaaaaccaaagcccataattgctaaaccagtagctagtccccgcttatcgggaaaccaacgcacgatagtagaaaccggggttacatatcctgaccctaatcctaagccacctattactccatatgcgacatataataaccataattgatgagactgaatcgctaatcccgttaaggcaatcccactcccatagcaaatacttgaaatagttccagtaactgttggcccaaatttttctactaaacgccccataaaggcagctgacatccccaaacaaaagatagctaagctaaatgcaaacgatactgaagtttccttccagcctgtatatccagagattggtttggtaaacacactccatgcatagacactaccaatcatcaaatgcaaaattactcctgcaatagctactccataacgatttcttgttttcggcatcttcactactccttctctacataatttacgaactttatcataaattaagctctataagttcgtctatttaaaaatatcatagagcaactaacttatcaataagaaaaaaacgaacaatctaatttagcgatagcatttattactgcttgaaacttacctttaatagcaaaaaacacccagcttttacactggatgtttctcattggcaaatatgttgtttttaattgagttgacttagttttaaaactaccaaagtaccatcatatcgcagttccaactctaagttacattatataattctattcgtactcttttgtagagggccttgatatatcagtacttcaaccgtgatttagcttatacggtagaaaaccggtagacaactcgtattacaatgccacaaattgattaccattgaaatcaactaaagagtgattaggatattcaattttccctattgctccattcagctggtcagcaacagttcgattacgaccacgccataactgtgaataatacttaagtgttgtggtcggcttagcatgccctaaccgttgagatacagctaaaatatcaacattgtatttattaattaacaaacaagcatgtgacgtccgtaattctttagcctgaatacggtgaactcctgctaaatcagcatatcgattaacaatattattaacggttgaacgatgtaatggttcatcagtggcactcagtacataatgatcatcaccctgttgcggtaaattatcatactgtaactttttccaccactttaaaagatccacaaggtcagttggaatatcaatggtccgcatccccgcagtagtcttagtataattcttgcgttttttatctgggtctttagtattcgtcaaagtatgactaaccttaatatacccatcagctaaattaatatctgaccaccacaatgcaagtgcctcggaaacacgcattcctgtgaaatagtaaagattgagcatcacgtaagctaaggcaccttcaatatcaccaatataacactttgagataactttcttgaattcttcaagcgtctaatagtgaataatgtggtggcctttggaaatcgctcccgttgccttcttaatcctagaaggattttgagttaagtaatcaagctcaactgcactatctagcacttccctaaacaggccatataccaacgaggcatacgattgcgaatagcccttctcatctgagagtaaccaatttctaaactgtaaacaatccactggctggatttgcttcagtttcttgttaccaaaccactttaaaatcatctcaagaactggttcacgagacaaccaagtgctttcttcaacatttccacgataagttggcttaaacactttattgtagaaatctaataacttaacgttaccggactgcgttggaaaaccatttttactgtactcatcgcggatacgctcagcttctaaatgagcatcacgcaaggttttaaaacgattaccatttttatcccgacgtgccttcttgattatcttttttccagttaaaggatctaagcctagataaacgctaatataaatatatccttgttcgccatttcgaggaggctgccgatacactgattaatatttagtctttgccatcagcgtcatcctcctcaagaggaactcccaaaacgacttcttctatgatagcacgaggtgcaacttgcaagcgaggattaccccaaaaagtttttccccgtttaaccatgacctgacgagtatcatgaagaatcgtttttgcttgattaggcttaaagcccatagctatcaactcattctttgaaaccgttgctttcattgattaccaccaactttctgagatggtgtataatatgggcgacaatgatttggtagaattattgtggatggctttgcaatgctttggtcggctgcaaagtcttttttattctgtaaataggctaaaattagcgattgcctcataggacttcgtaactcaaacaagtgaacgtactgatgattacttacgttatgttgtttcttataatgttcaagaagcagaataggtaagtacttactaggatttccattccagatcatacaatatcgaatcgctcgataataaagatgaggatacatgcttcgccaagtaacacctattagctcatgaatcgaaacatcgttgcaattttgttcgcaatattgatcaatcaacgtatcaatacattgaaaatagaattcaaaaacattcaattaagctcacttcttttaataaaataagcttgattcaaagagtaagtagcgctctccataatctagaatataaaagcgcttaaactcttctttagtaacgcccagttcttcacgctcctgatcaatctctttttgacttagataattattcggttgtccgttaaattttaagccagctggtcccaatttctgatagaaattcaattgagtatcactaccaaccagcttcagcatctggtcgccagcgtagttcatgaacatgtcatcagcataaatgcgtgatagtcgacgcaatagcaataaccgttcaccagctggcttatttttgaaataatttacatgattattctgattcttcattaagtcattccaaaacttatcgctagaccgtgtttctttaatagcagtgaatagccaacgtcgctcagataaggtcatgttaaagaaagtctggtaatttttattttaagaattgattgtattttttcataaaaaaataccccctacattttcgtaggaagtatttttagtcaaccataccagttgacagatatccaaattaatgctttgcaaagaagtcgcggtagacgtccgggaccacccggtcggccgcttgccattgggcctggagccggttttccagttggtcgcccggggcaaagaccgcctgcaagtccgccaccatttggtcgacttgtgctggttggtaacggttgaccggggccacgtagcgcggcgcgtgcagcgtttcttcaaagcccatgatcaacatgttgttttcaaaggcgccccgcacggcatcgaggatttcgttgccacggttgatgtctaaatagacgtcggcgtgggccaccagtttccgcaccgtcttagttgcgacagttggatagaggtcaacgttagcgtagtggtccaaactcatcagcttgctggacatttccgtcaccgccgctatcgcgaagtggaagtccggcaagcccttgatcagactttcaatttccaccaactgatcagaattagtcaggatcaagatttccttgcgttccttgttgagtcgttggaacggataagcgtaaccaaggtagctcagctggacttgctgctgcggctggtcggctaccaaacggcgcaagttgtcgtaagcggccttggtctggacaacaatttcggcgttaggcccgaggttgccgtttaaaataaaatgcatgttgcccggaatcgcatcttggagcggttcttgccagaagagacgcgggtgcttaacggctgccccgagcttctggacgacaaacagcggcgtggacagggagttaaagttaatttggcgaatatccaggtccgcttgctgcaggtagtaagcaatgatctcagtctgattgttgaagaatcgtggctggccgttaggttggtagtagaccagttggccggtcaggtggttagagacgacaatttcttgaccggcccgggtcaggtaggtggtcagcgtcgggtgaccggcttcatcgtagtcggtcacggcgtgcttgaagccccattgattgtagtgatcaaccacccggactcggccgttgcggtcaaaccattccaccgtcttgaccggtcgggagttatcggtcgtggcaaaggtaatccgcccccgttggatccccatgtccattagcttgccaccgctgctgttagcttcaatcgcccagtagcgcggcaaatcaatctggttaaagtagcgcggtttgccgactaattcttccccggccagctgtaggtagtacttcagcggggaagtcacgtcgtcaggcaagaaaccatcatcgtgcaagacgaccgtcgggtacttttggccagccaccaactgggaaaattgcaggtctttgctttcgactgtgtagaaatcaaataaattaatcatccgcttgcacctctttcaacaattgggcccacttggcctcaatttctggttccaagtagtccgccgccaggtcataggacacttgttccgcccgttctaagtctaatttagcaaacagggctgctaacgtcgtcgtcaaagcgtggatcgcttgctcgcccgtttcgccgatttcgtacggaatcaaataaccattttcgtcgttgcgaataaaggtctgatttccatagcggacgtcaaagccaatcatcgccagtccggaacccacagcttcaagcaaggtcagcccaaagccctcactggtggaagccgaaatgtaggcttggtagccttgataaacatccgttaagttctggtgtccctttaagtggatgtaatcttccgcttgcccgtccttaatcagctgttgcaacttggcccgttcgcccccttccccataaatatcaagggtcaattgcgggaattgggccttggcggccatcacggcttggactacccaatcgaggtgcttttcccctgccaaccgcgaagccgtgatcagactaaacggccgccgcggcgtggttgggtgctttaattccagcaaactgccgaccggaatcgtaaagatttgcgggtgggcctggttgtacttagcaaattgggccgccaacagctcggtctggacctgggtggacgtgacgtagaaatcaatgtcgcggtggtgctggaagacatactcgtagtagttgttccacaagatatgatcatcattggtgttattgacgctaaagtgctcagcgtgcacgacgctgccgaccttggctggccccttgtgggctaagatttgttgagccatcccggtcccccggtcgacgataatcacgtcccccttctgcaaggccaaccgttccaaaaaggcggtgatcaattcttccttggacaataacagttgacccggcaggcggaaagtcgcgttatcaccggtcggtaattcttccatcgccacggagccgtcctcattaaagaagcgccgcaccatcagcttggccttaccatcgatcggggcgtaatattcgctcatgtagcggccgtagctaaagaaatcgcggtgaaagaggttgccgctgcgcacgtattcggcccgcaggacttgctcactgccagcgcaccgtaaaatggcccgcacgtagtattgatcattaaagatgtacgtcaccatgttgccttggcgttccactttcgttggttgctcggcaaaggtcgcggttaaatcggccaaagtgtaggtcgtcggcgcaattttaaagtcactaaaggcttggtagagccagatgacttcttcatctttaaagcccaggttggcggtatagtgctcaatattttgggccgaaataaaatcagtaaagataaattttgcatccacccctaagtgatggaagacttgggcccggtaagcctgggcgtattcgaccccgctgctggcccagccgattccttggttaaaattataaacagtcatcataactcctcatttcactacttgatccatcacaactggcgcttggcgcaaaggttcaacgtcaaacccctagttgctgagttggccctaacgcaagacgctcatcaacgaaataatgacccccataatgacggagagggcaatcaaaaacatcaatttttgttggaggttaaaagctttttcttttttctgcttcgtgggcttgaattgctccttggctaaccggttggcgatgtcgctggtcaacgggtcgtcatgcttttcgtgctcatgcattggtttttccctcgcttcctagacaaagtaaatctgcttttcaccctttttgttgacgtcgatcgtactcatcaacaagtggcgggtaatccggtgatacaagtcgtggcgcatggcgttatatgaacgcagggcttccttgtgatattcatacaagggattccgctgggccgtcgaccggctggtcacaatcgtttgcaattgggacagcccatcgatttcttccacccagcactcatcaattgcttttagcaccacaatccggtaaaaatcattttcttccttggtgtccgcaaaagtggcctgcttgcggcctaactccgcgcgggcaatgttcatcaggtagtcgacgaccgtggtttgatcagttaggtctaacgtggtcggccgtgcaaagtactgataagtcacgttatctaaaatatagcgtaccagttgatcgaccgttaaagccgggtgggtggtaaagaagcgggtaaactcagcttgcaaaatcgcggctaaatccaaatcgacttgctgatgatacaagagccggttgcgctcgccaatgatcaactgccgctgaatctgagcgctttcgtccatttccaaggacttgcgccgctgctggcggtcggcactatcactggcttcttgggcctgggcaattgcgcggcggaacttccgggtagtaatctcctcggggtgggccggatcagtttgccgtcggcgcttcttatagtacttctgcaaccagcgggccccgtgcttgattacgacttggtcttccaaggaaacgtaaaattggctggtgcccggatccccctgccggcccgcccggccctggagctgctggtcaatccgcttgctggccattttttcggtcccaatcacggctaaaccacccaactccttaacgccgggccccagcttaatgtccgtcccccggccggccatggtggttgcgaccgtcactgcccctttttggccggcttcagcaatgatcgccgcttctttggcggcatttttagcattcaagacactgtgggggattttttgttgcaagagcaattccgaataaatttccgaaacttccacgttggccgtcaccaagagaatcggccggccactttcgtgcagccgcagaacttcttggagggaagccattaacttttccggcagggtggtatagaccttgtcgggcaaatcaacccgcgccaccgggcggttagtcggaatttgaatgacccgatcgtaataggtctccagaaattccttttcggccactttccccgtcccggtcatccccgccagcttcttaaacttacggaaaagattttggtaagtaatcgaagccagggtccgggtatcgggcgaaattttaacctgttccttcatctcgattgcttggtgttgtcctgcttgcagtttcattccttccatcacccgaccgttggcccgatccaaaaggtctacttcgccatcttgactgacaatataatctttatctttttcaaagagccggtgagcctttaaagctaagtttgttgctcgtaataattcagtgtgatgaccattgaataaattcttaaccgcaaagtagcggctcatttttttataacctaggtcagtaaaccaaactgcattttcctccttatcatatttgtactcttccccttccttaagggtgtagatgaattcatctgctactcccaaccaagttgattgtacccgcggtgaacctgaaatcaccaacggcatcaccgcgctgtccaacaaaacagcatctgcttcatcgacaatcgcataattaaaatcacgcataaatttattttccacactagttgctaaattatcaaatagataatcaaaacctagtgttgcattagtagtataagtaatatctgccgcataggcactccgcttatcttcgttggtaaactctttcgatcccggcgcagcaaaaccaactttacaattcaaccctagccattcataaactttccccatttcagtgccatcccggtaagccaggtattcattcggagtcaccagcatcgcccctttgccgcttaagccgtttaaatacaagggcatcgtcgccgttaaggtcttgccttcgcccgttttcatttccacgatattaccctggtgcagggcaatgccacccatcacctgcacatcgtacgggtacatccccagcacccgccgatcagcttcgcgcactaccgcaaaggcttccactaacaagctatctagggagtgtccgtcttttaactgctgcttaaatttccgcgtataatccttcagttgaccatcactcaaggccgccatctgcggtgccaactgattaatttgtttggtaatccggcgcagcttttttaatcggacccggtttaataatggcttcttcattactctttatcttccttttttattaatttctgcctactaatccagatattgattcaccacattaatacgacgttcttgttgaatggcattgtaaattaattgctgttcataattgacgatagcgctcaaactctcgtcaacgattgcatcttccacgtcttcgtcatcatcttctgctttagctatttttacctgttcagctacctggtcagtcacatcagttaaatctagtcggtggaaaattatctctgtgcagccagcgctaaccagctcaacagcataaaagtaagcggtcggttcaaaagtaaagatcccactatcttgacgtatgattgccatcttcaccagcttgccttcataattaaacatcaagactcgcaagtataatccctgctcgtaattgctttcggctactaagtggagctggtattgatgattgtgttctaaaagtggcaactggggtaccgcatgggcagttgcaaagttaaatagttcatcccagtggtaaatagttgagccagtcggtaaaaagggattccgtaactgaacatggtcctgggccaaaaatttaatgcgcgttccatgtaggtaagcatgagtcgccgattgaacagcactaccataatacttgtcggactgataaatctctccccgcgcagcgcctaaaccaacgtaaaacagatctgctggtgacttaatgtagatactttgcatcattgcttcctccggtcaaaatcccgttccatcattgtccagtattgcttttttaaccaggctgccgtttcatacccagcatcattatggtgtccatctagcccccgaccaataacataaggatgtttgccagtttgggctaagtgaactaacaaatcatgatacgccttattatcgtagtcatcttggcgcatataagttaacatcaattgggtttggttgagatcggtctggtcaaatttagaccagaaacgttcgttcatcgtcttaaccatctgtttgcggccagccaactgtgctttccgcgtagtatatttattaattatatctaaagaagttgcaaagccaccataacgaacagattgctcacactgagcaacgtttccaagatttaccaatggtttcccaacaatgatactatgcgcccccagctgactaccataatatagagcaccaaaggttccagctgataagccggaagtattaagctgatgatgatcaaatcctaaccaagccagggttttcaagatccgctctttaatctgagtttcaaactctggactccccaaataaaaggctgtcccttcgatccgtgggtcagcaaatagtaaaaatggtgccccgaatgaacgcatcatataaaaggcttcaaatccctcggccgtccggtacccagaaaagtaaacatttaacggcggtttaaggtcaccagggttaaagtagtaattaacttccgtccgatcgtgatcgataagtcgtcccccacccggcaagaattcccccatttcatagcgtgaccaacggaggtgaacattacctaaagatagccatccttgtcctttagcctcaaaggtaatacaaagacttcctcccggaatcgtatcataaactggcacttgctccgtcatatctttttcagtaaaaactaagcgtttagaaaaagtatacggatttcccggtggtgcttcataaactaccattcgtagcttaacttcctcactatgagaatactcactccaaagcttaagtaatcttcctcgatcaatataaccaccaaaacgataagttcctactggttgatagtcagtgccaaagtcgccagtcaattcgaccgccagaaagccattaaactctaagctaccacgataatttggtgccggttcaaacattgaaggatcaagttttgcccccccttgcccctcaaacagacgagtttgcaaccatttcacaatttgatcccactcagttagtggtaaaggccgaaccactttcgccttaaaatagtcggtttgtaatggcgtttttagttcttttaggaccgcaggggcgcaagtaacacgataactgtcaacatacttgaacagagcttgtaaatctacatctgtcgggcaagctgcaaagtaagcccccacgaaattttgaacccgtggcttttcgacttcgacaactggcttttttttctttaactggttagtcgcctctttcgtcactggcttttttgaagataattttggcttaggatttaaatcagctaacaaggatgacactgcccctggtgcggcataatgccactgatgatctttgtcggcaggtaactgtgctgttaaatcatttggcccaattaataagtaatgttccactttactcctccgcctttttcaatgcaacttgaaaccgcttgacaatccgaccactagtatagtccgcaattttattggctgcatggaccagcgccacgttccaatttttcaagccatctaaataaaagtgtaaggatggcccaagctcattttcaacatcatcaatgcggcgcccattcttcccttcctccacataaagcgattcagcccttaaaatttcagggatcccggcactaatcccggcaatctgtaaaaatacatctggttgagcagctaaatcaattatgatacgagtagtatgaatggcttgaattaaatctggttcagaatttacaacgaccaaatgaatatcacgcttacgttcattattacgtgcagcatcaaggtcatcagcaagttggttttcggccttagaagcttgtacttggttaaaagtatattcatcttcaagatccaagtttttgtctaattccgctactaaacccgcgatttcatcctgacgttgaaaatcctggaaagtaaggagcgttaaatcaatcaattcattttcattcatcatagtcatgataatccgtaaacttttacgtaggagaattggatctactccgtcaatagcgaacataattttcaaaagccgctcctggttgctgatgccaagacttaatcttgtatccaaaggtggcagttgtaacacctgagcaccaaccttcgtcagctgctctcgattataattagaatcagcgatcgttaagactgcacgctgtgccatctcagcttcaatctgttcttctaaattagcccgattaccaaagtaagacaacactacttgatcattgggaagcacatccattagcatttgatcatgaaatggatcggcagcagcgattatgacatctttagaatgaatttgttgctgactaaatagagtgaactgctcgataattaaactcctcaggttcggatagaccccctgatgctgagcaaggtgagtgcctccaacaatatgaactttcccgtcagatgccacgtagaattgttcattaccgttactatccaagtaagcctggcgttggcactgttgctgatcatcatattcgctgactcgcgaaacaaagccgcgatcgtcaaagtccagcttccgataaaggcggtcatctttaaaaagatccatcatgattagattgccttccggtcccattgaaagctgagcataacgttgggcatggctaaagacagtcacggtaaaggggttgtagacgtaattggcgtcagcaggccaggtaaagtcgtggtaatcaaggttgaccaccgataaatcggccggaatcccctgtaagtagtcaaagaccgccaagcgcggcacttcgtaaatcccctgctggtaggcaaagtgacggagattaggaaagtacaccggaaccagtaaggcggccgtttgctcgcttcgagtaaacatccgaacctggttgatcgtatcgtcaaagccgtgctggttctggcggaaccaaatttgttcgcgactgtcccaggattgatcgccccggtaccaagcgggtaaaaagtaatacatcccttctacacctcctttgcgtggtcaaatagcggccgatactgcttgcgaatcgataagatattgatctgatcgatcatccccatcgaaaaaccaacgatcatcaagacgtagcccggcaacatatagatccccaattgtccggggtggctgacaatcatcaacattggcatcccagcaaagataacattgtaaacaccgcccacgaccccaaataagagggtaatcaggttgatccgccgctcagtcgccttacccggccgtacgcccagcaggtagtcgccggagcgctgaaaggccttggcctgctgttcggcattaacgttaaccagcgcaaaggccaaggacaggataaacagcagactgatgtagaggatgattcccggcaacttggtaaagccaaaactggtcgccccccaagccaaccagtaattttggggataaaaggtcaataagaataaacaaaagtaagtgggcagtgtaatcatcgacatggcaaacatgatcggcatcccgccggcgggggttaatttaattggcaaatacgaacgcgaagcataattgttatcaatcataagacgcaccaagggcaaacggtattccccccggtcagccataacattgaggtaagcaaaaaggaccatgatgatgaccagggcggcgaccaccaccattagacgggtcgtggaatgatcggctaacatcaaaatccccgctaatcccgttttcatcgcactctgcaaaatattggccagtaccaagagggtcagcccaccaatccctaacagggcgttcatatttgacagccacatgataaacatcgtcccggtcgtcatggtcagcaggaccgcccctttcgccgcccagcccgtctgggtcaattgcatggaactgaccaggacaaagccttgaattaccgttagtagtaaggtaatctctttgcttatccaatccttgcgccgctcagataagcgatccatgccaaaccctcgtccctgagtcaataaattggcgatgatcatcgccgacatccacggtgaaagccccaaactaaagagcgaaagctgggttaggtcccccccagtcgccaggctggccacgtgcaaactggcattttttaccaccaacgatttggcatcagtatatggaagaggaatcgacttccctaaaatgaagataaagacaaacaataccgaccagcaagccttatgaaagaccgggtgattgaatttccatttttgccaagtgtgcaccgcacttccccccatttcatcgaacaatgtttgccactcagattctagctgttttataatacaatttcaataatgcaataatcaaaatagcgatcatatttatatgtttgctaaaaaaacagcatcgataagggcgcgcttggtaaagaatccatctcgaatcatatttcctatgcgattagcatttctcgataatgtggcatactgttcatcactaatttctttcactttttccgctgcttcctctaaattagcaacacagtaaccaatgtgatgctcatcaatgaattcactttgcgccaaattatttttaacaacgactggtattccggacgctaagtacgtactcaattttgatggagcatccattgtcatatattgctctgtataaggatcatctgtccaaactaagccaaacccaccgtttcgttgcaaactttccagaagtaaaggatcaattttataccctatagcttcaacgttttgattatctatttttgcgtcagtataaacttttaatttcacttttaatttcacatcgtaattccaacttttaataaaggtaaacttatcaggatttccggcaaaactaattgtatgagaatttttgggagagataaatggggatatcatacctgggtggtcccaaaattgctgataaatcactggaatatcttcttttaagccatcttgccttaaacgttcaatcaatttaacagacggagcaatcagtacatctgctttattgaaatattgaatgtacttaggcatcaaatacaggttcgcttcaaacattaagggaagaacgtcttctataaaaatgacttttttcaccccgttatacagtgagaccctatcaactaatccgatatcccaatcaatcgaattccaacttggcgcctgaaagattacagtatcgttatttgctaatccggctaacatcccatcaaaccgtccgtttcttacttcgattggttcatcaggccaatcataaaaatacattggaatctctttaaagtgtaaatcatgacacgcgatctctgctaccgtattttgagcttgttgtgctgtatttacgtagttaaggccatggatgtttgtaataaagactgtcattttaacctcacttaatactgtatagcttcacctttatctccattcaagattactaatcatttcaaaagctgccctcttaattggaaagttttgcctaatcaaattaccaatctggtgagttctctcgagcatttgatcatactgttcttttgttattgacctcatagctacctctagctttgataaatcacctaatgccaaaccaatcccatgctctttaacaaattccgctaatgctgattgcttagcaactattattggttcgtcagcagccaaatacatagctgctttgtaaggagaattatacttttcatactccccgctccatcctgttatttgaggataactggtagaggcccaacatagtccaaagctcccagatagaatgctaggaattgcttcatgatcataatttcctcgataattaatgttagggtagctattcgtcgttaaatcatgcaagacattgtcggtctccacttcccgtccaaaaacgttaactgcaatggatgatggaatccccagtaaaaatcctgctttagtcaggttacctgcgaaatcgatttctaatttcaaagggcgtttccaatccattgaattcttttttgctgaatatccaaatacatccagatagacaaaactattactgtactctagtccggcaaaatcaaaatccccctgcaaacgttccgccatttgatgattatgaacgattaacccatccatttttgataaaaagtaatgttcaacaaacgaattactatgatgatctgtcaacatttcccgtgcttctttaactgatttttttccttgccatgaagtaatatcatgaataatcgctacacatttggcaccaatttgattatgaaggtaatctatcaaatagccagtgtatgcgtttgaattgtgcaccggaaattgaaggaaaacaatatcatctttctttatccccgccagttgaccatcaagccttgtttgtagtgaactggcaggttcctcatcccaaaaataaatgtaatagtctaaagtacgtgcattcaacgcttgtactaaactctctgttacttcatattgcggccgaccaaaagccgtattatcccaatatgggacaccattttcgcggctaccattactgctcataacccaataattcataatttgcacatctccatatatagataataatgatcttttagtagaaactcaaattgtagagtgttttacctctagtgatgcctaaacaagatatcaactaaattgatacgttagttatattttttcaaaaactatgactctatttgatcccaatagattggcatgacagccgttgtactactaaaaacgtacatataaaggtcacgcacagctgcaatcaaccgatcactggttgcatctaactggttaaatagttgatctacgctctcgtaaagaatcgtgtcgttatccaaatacaacacatgctcatagtcagctaacaccactggcaaaaaaattcgttgtaagtacaaaagattaacgtgatcttttacttgcgctactaattctgatggtagttccaccaaggcatgcggtttgacgtggacgtgcggttcaccaactaccgtgggtaattttgctaggaccttcaaatcttctgtaaccacctgttcgttgaaaatgtaaatgtctaaatcctcaattgacagatagtttttttatcaatgatatcaaggaaacgcttaattacttagtgtaatttcctgagaccacgtaacaaaccgcatttttagattccatataataaagttcccccaatcttcgtgttattagataaccccagttaaggtaccatccccatcactgctttttactcgctgccttttccaaaatccgcaaacgttgcatcacgttcttatactttaccagattggtgctcccactctttagcagttcatcacggtgcactcccaaccgccaacggtaagccttcaattcttccgttatatccatccccagcaaagccatcattgtaacccgctgttcaattgcttctagtgggtagacgttggcttgactcgtttcccgggtcacactattggtccgctttcggtgcatgtttaggggcttattcataaaggccagccggtccgccaataaataaacttgccaggtggtcaaatcatcttccacggcccggtcggtcgggtaggcgatctggtcaaacaattcccgcttgtaaagcttacctcacggcaccgtaaaacactagctcaggttaaaatgcatattatactcttcggcaaaccactccgccggggtatagaccttttcatagtgatcttcctcgcgcacccgaaaatagaatgtttgcttgtcttcaacaaattcataaaaattaccgattgcaacatcggcgtgatgacgttgcattaaatcaaccaattcggctaaattggtcggttccatccggtcgtcattatcaacaaaggctagtaactcgccggttgccatcgctaatcccgcgttccgactgtcgccaacgcccccgttgggcttatgtaagacccggacccgggaatcttgggcgcggagttgctcacaaagcgccgcactgcggtccgttgaaccgtcgttgaccaaaatcacttccaggttttggtaagtctgatttaagaccgagttcacgcaatccactaaatatttttcgtcattgtagaccgggataatcaccgaaaccatttgcgctatttttccatctccacttttattaattacaatgttaacaaaaattccttattttataccattagctgtaatccatatcaaaaccatttaagttatcacctaattccagcaaaagttgtcgtgaaaaaaggtttccccctaatcgacgaaaagaatcgtaatagcggataaacaacataaaatttaagggcatcaatatcccagcaatttttggagaaggataaataaatttgccgtccttaagagctacaaaatttgtaaacaaaacatcattatttcctttttgacgagtattcattaacttagtaaccgtatccggcgcagctaaaaagtcctctgcctcaataaaaaggatatagtcgccgatagcttgcgcaagcccaacagtttttaaattctcccactttttactactattttgcaatcggtcattggtaacttcgtagcaatttctggatcgttagaagctacaatcacttctaaatctgggtaatcttgttctaaacaggtttcagcacatcttttcagtccgttctccgtcccgttagttaaaattattaatgatactcgcaccacgttagtcctccctcgtaatatttacccgctgcttaccctcctacatttcttttatcagcttccgcacataacctgctaaatcctctggggtaggaaaaaacatggcttgattattttgataatcctctcgttgtaacgccaaaatcggtttaccagtcgcaaaaaaacgttcttgcacactttcatcacgttggatcagtgttaaatccaacattgctacactggtatcaattaattgcgttaatgctgctggcaagatcgtctgatgcaaattaacattcggataagctactaaacgctttaactcaaaactcataaaaacaggagaagcaatctcaaaatcaacctccggcaaaagcctaatcagctcctccaattgatttaattccgcccaagctgtatacaacaatagtttgggtcttactgatttgcttattacgcttaagtgattaccaatcatttgccattctaggttgtgatactcccaccattgcatacgtccgcgcacagttgacaaaaaattccacggtttgtcactacctgtatagtgatcaattaccgcatcattcactactaactgatcgtacgggggccaaccaaactgttcgccaacccgttccaggccaagctgattgttgaaacgagccggtaattcagtaatcgcaccttcacaaacgcgattaagaactgtttgatcaccattatcaatctcattttcatggctagagaaaaaatcgatgcaacgacgagttaaatctgctgtctgccatcgttcataatcaatagcactcctgtgttatacggtgcacaattgatttcatgagccatacccaccggttgcccttgtaaatcgaattttaataatggccacagactatgccgaacaatcacatcactatcgagatagagaattctctttgcttcaatcaattgcggcaggtagattcggacgtaactgtatccattaatgtgttgccacgaaactttgccaatcgccatttggttaagatcaatttttaagtcatggagctggctccctactggcgacaacttttgattaatattccgaaaccattctggtggaatatccatatttgctaagtaaacatggacattaggagtatgataaaaaattgattttaacgtcgtttccaaggccgttacatagccatagtccgcagccaaagctactacataatcgtgcattctttccctccaaattcacttactacttaactaataatttttctaccacttccaccaacatccgcttaaacatatagccattgcgcaacaaatagccatagtccttagcattttgggccatgcgctgatagtcttcggccgtgcaattttggaccagctggtcagcttccgctaaactttcggctaacaaccccaaatggcggtccttaatcaattcggccgcggcaatgtcagcattggccactacgggtagccccgctgccaagtaggtactgagcttataggacgcattgaggtgggaatattgccgttctggctgttccggggtatcgatgctccagcacaggccaaagccgccgtccaacattggtaacagggcgctttcgggatggaacccgacgtagtcaatgttttggtcgggatcggcctgggcatcagccgcaaataaccgcaagcgggtctgataagaccattcccgggtaaagggaaagcggctttgactgcctaaaaaggtcagttcccgccgaaacgccgccatttccggttggtaagtggtggggtgatcccacaggtgttggtaaacgatattatcaaccgtgagtccctcggcccttaagcgcgcagccatattttcacttggcaaaatcaacaggtcggcttcattgaaaaattccacgtacggccgcatccagtcagcataattttggctaaacatcagcggcgggacgtcttgaatgaagaaaacaatccgcgtttggtaaaggcgcagctggttgaggtactgccgctcgaattccagcccgttccacgtcgggagctgaaagatcacaatatcacccatctgcaaagaggcattgatgccgtcgatgcgcacccggagttgttctggcgaatcactggcgacattatagcgatagatggctaattcattagccccctgatccttggccagctgagccgttacattttgtgccgcttgggcggtactggtattcgccatgccgtagaggttggtaatattaatcttcatttggttccattccttcctgactaagatcggcgacaatctgggcggcatatgctggcgccgcgggcaaagtaatgtcttcagcaaagttatgttccatcgtgtgcttatggctgagctttaccttgctggtcgcccccatctgaaaccactcgtattcggaatcaatgtagccaatatccactaattgcatccccgttaccgccaattcgccaaccaaggctttagcagttgggccaagcatcaataagaccagcttgccgggcccatatttttttaatcgcggccttgagcacattgtactgagcaaaggcattatgcgcggggccaagaatccgctgcaccgacttggcattggcaaataaatcattcctcacccccgaccgggacagctgcccttcgacaatcaagatgtcgcggtcgtcccatagttgccgcagcttcgcaaaatagccctgggccaagcgcttgtcttgccaattcatgtagggacgggaaataaaggtgttgccgtaccagtcgacattggctcccatcaactgataaattgcggcgttggccggccgattctgagcccaaaaggcctgcgctgccggggtgtagcgttctaagtggctaaagacgtccgacatgcacaccaccagctccgggtggctcggcgtatacaacagccgtttcaaacgttctactagcgctgggtcgtaaacctggtaaggaatatcgcgtcccgcaatcaggtcaatctcgccatcaccaaagcgagcgactgatgaatgatgcgccaaaatataatctaaggtttgatcaatatccttgaccgtgaccccgtaaagcggctctgttgccatcactatcctccgatcgattaattgattagttactatgataagtagtcgatcagcgaaagtcaatcggctttcgccaaccaatgacaattcctctaaattgtctcacaatttagctaacgctttcattcaaattttacacccttttttccgttgttacagcaaatcccccccatcgcgcttatcccaaagaaaaagcctgaaccctaaatggattcaggctttttgactggcaaacacgcttatttatcgttatgatcccggcgtttcttgcggccgagcaagccggctagcaagatgcccaggccacccagcaggccagtagccggggcagattcattcccggtttgcggcagcttttcaacggccttgccggtcttcgttgcgctcgggtcaactggacgtgctaagttgacgtagttatccgtgttcgtcgtcacatgcgatcccagttggctgattgattcagaatcgtacttcgccaaaccgtcatcagaaagactggtcgtctgtgaagttgatactgattgggagtcaaccttgtgactgtctgacccactgtgacttacagactcacttgcgcttgttgatgcggattcgctggcactagtagaagcggattcacttgcacttgtagatgcggattcacttgcgctcgttgatgccgattcgctagcactagtagaagcagattcacttgcgcttgttgatgctgattcacttgcgcttgttgatgcactttcactcgcactcgttgaggctgattcactcgcgcttgttgatgcggactcgctggcactcattgatgcactttcacttgcacttgtggatgcggattcgctggcactcgttgatgcactttcacttgcgctcgttgatgccgattcactggcactcgttgatgcactttcgctagcactagtagaagctgactcacttgcacttgtcgatgccgattcgcttgcacttgtcgatgctgattcgcttgcgctcgttgaggctgattcgctagcactagtagaagctgattcactggcactcgttgaggcactttcacttgcgcttgttgaagccgactcacttgcgctcgttgatgcactttcgctggcacttgtcgatgccgattcacttacgctcgttgaggccgattcgctgacactcgttgatgcactttcacttacgctcgttgaggccgattcgctgacactcgttgatgcactttcacttacgctcgttgaggccgattcgctgacactcgttgatgcactttcgctggcacttgtcgaggcactttcacttacgctcgttgaggccgattcacttacgctcgttgaggccgattcacttgcgcttgtggatgcggactcacttgcactcgttgaggcactttcacttgcacttgtcgatgcagattcgctggcactcgttgatgcactttcacttgcactcgttgatgcactttcacttgcacttgtcgatgcggattcacttgcacttgttgaagcggattcgctagcacttgtcgatgcggattcacttgcgcttgttgaagcggattcgctggcgcttgttgaagccgactcacttgcactcgttgaggctgattcacttgcactcgttgaggcactttcgctggcgctcgttgatgcagattcgctggcactcgttgaggccgattcgctggcgcttgttgaggccgattcgcttgcacttgtcgatgctgattcacttgcactggttgaagcagattcgctggcactcgttgaggcactttcgctggcactcgttgaggccgattcacttgcgcttgttgaagctgattcacttgcacttgtcgatgctgattcacttgcgctagtagatgccgattcgctggcactcgttgaagcagattcacttgcgcttgttgaagccgattcacttgcgcttgttgaagccgactcacttgcactcgttgaggcactttcgctggcgctcgttgaagcagattcgctggcactcgttgaagcagattcgctggcgcttgttgaggccgattcgcttgcacttgtcgatgctgattcacttgcactggttgaagcagattcgctggcactcgttgaggcactttcgctggcactcgttgaggccgattcacttgcgcttgttgaagctgattcacttgcacttgtcgatgctgattcacttgcgctagtagatgccgattcgctggcactagtagaagcagattcacttgcgcttgttgaagccgattcacttgcgcttgttgaagccgactcacttgcactcgttgatgccgattcacttgcacttgtggatgcggactcacttgcactcgttgatgcactttcacttgcacttgtggatgcggattcgctggcactcgttgatgcactttcacttgcgctcgttgatgccgattcactggcactcgttgatgcactttcgctagcactagtagaagctgactcacttgcacttgtcgatgccgattcgcttgcacttgtcgatgctgattcgcttgcgctcgttgaggctgattcgctagcactagtagaagctgattcactggcactcgttgaggcactttcacttgcgcttgttgaagccgactcacttgcgctcgttgatgccgattcactggcactcgttgaggcactttcacttgcgcttgttgaagccgactcacttgcgctcgttgatgcactttcgctggcacttgtcgatgccgattcacttgcgcttgtggatgcggactcacttgcactcgttgaagccgattggcttgcactagtagaagctgattcactggcgctcgttgaggctgattcgctggcgctcgttgaggctgattcactggcactcgttgaggccgattcgctggcgctcgttgatgcagattcgctggcactagtagaagctgattcactggcgctcgttgatgccgattcacttgcacttgtcgatgcggactcacttgcactcgttgatgcactttcgcttgcacttgtggatgcggattcgctggcactcgttgatgcactttcgctagcacttgtcgatgccgattcacttgcactcgttgatgcactttcgctagcactcgttgatgcactttcacttgcacttgtggatgcggattcgctggcacttgttgatgcggactcacttgcacttgttgaagccgattcactggcgctcgttgatgccgattcacttgcacttgtcgatgccgattcactggcgcttgttgatgcggactcacttgcactcgttgatgcactttcacttgcacttgtggatgcggattcgctggcactagtagaagctgactcacttgcacttgtcgatgccgattcactggcactcgttgaagcactttcacttgcgcttgttgatgcggactcacttgcactcgttgaagccgattcgctagcacttgtcgaagctgattcactggcgctcgttgatgctgattcactggcgcttgttgaagccgactcacttgcgctcgttgatgcactttcacttgcgctcgttgatgccgattcactagcactagtagaagctgattcactggcgcttgttgatgcagattcgctggcacttgtcgatgccgattcgctagcactagtagaagctgattcactggcgcttgttgatgcagattcgctggcacttgtcgatgccgattcgctagcactagtagaagctgattcacttgcacttgtcgatgccgattcactggcgctcgttgatgccgattcgctggcactagtagaagctgactcacttgcacttgtcgatgccgattcactggcactcgttgatgcactttcgctagcacttgtagatgcggattcacttgcactcgttgatgcactttcactggcactcgttgatgcactttcgctagcactcgttgaagcactttcacttgcgcttgttgatgcggattcgctggcactcgttgatgcactttcacttgcgctcgttgatgccgattcacttgcgcttgtggatgcggactcacttgcactcgttgatgcactttcgcttgcacttgtggatgcggattcgctggcactagtagaagcagattcacttgcgctcgttgatgccgattcacttgcgcttgtggatgcggactcacttgcactcgttgatgcactttcacttgcacttgtggatgcggattcgctggcactagtagaagctgactcacttgcactcgttgaagcactttcacttgcgcttgtggatgcggactcacttgcacttgtcgatgctgattcgctagcactagtagaagctgattcacttgcactcgttgatgcactttcacttgcgcttgttgaagccgactcacttgcgctcgttgatgccgattcacttgcactcgttgaggcactttcacttgcgcttgttgaagccgactcacttgcgctcgttgatgcactttcgctggcacttgtcgatgccgattcgctggcactagtagatgcggactcacttgcgctcgttgaagccgattggcttgcactagtagaagctgattcactggcgctcgttgaggctgattcactggtactcgttgatgcactttcgctagcactcgttgaagcactttcacttgcgcttgtggatgcggactcacttgcactagtagaagcagattcacttgcgctcgttgatgccgattcacttgcacttgtcgatgccgattcacttgcgcttgtggatgcggactcacttgcactcgttgatgcactttcgcttgcacttgtggatgcggattcgctggcactagtagaagcagattcactggcgctcgttgatgccgattcacttgcacttgtcgatgccgattcacttgcactcgttgatgcactttcactggcactcgttgatgcactttcgctagcactcgttgaagcactttcacttgcgcttgttgatgcggactcacttgcacttgttgaagccgattcactggcgctcgttgatgcactttcacttgtgcttgttgaagccgactcacttgcgctcgttgatgcactttcacttgcgctcgttgatgccgattcactagcactagtagaagctgattcactggcgcttgttgatgccgattcgctggcacttgtcgatgccgattcgctagcactagtagaagctgattcactggcacttgtcgatgccgattcactggcgctcgttgatgccgattcgctggcactagtagaagctgactcacttgcacttgtcgatgccgattcactggcactcgttgatgcactttcgctagcactcgttgatgcactttcgctagcactcgttgatgcactttcacttgcgctcgttgatgcagattcgctagcactagtagaagctgactcacttgcacttgtcgatgccgattcactggcactcgttgatgcactttcgctagcactcgttgatgcactttcacttgcgcttgttgaagccgactcacttgcgctcgttgatgcagattcgctagcactagtagaagcagattcacttgcgctcgttgatgccgattcacttgcgcttgtggatgcggactcacttgcactcgttgatgcactttcacttgcacttgtggatgcggattcgctggcactagtagaagctgactcacttgcactcgttgaagcactttcacttgcgcttgtggatgcggactcacttgcacttgtcgatgctgattcgctagcactagtagaagctgattcacttgcactcgttgatgcactttcacttgcgcttgttgaagccgactcacttgcgctcgttgatgccgattcacttgcactcgttgaggcactttcacttgcgcttgttgaagccgactcacttgcgctcgttgatgcactttcgctggcacttgtcgatgccgattcgctggcactagtagatgcggactcacttgcgctcgttgaagccgattggcttgcactagtagaagctgattcactggcgctcgttgaggctgattcactggtactcgttgatgcactttcgctagcactcgttgaagcactttcacttgcgcttgtggatgcggactcacttgcactagtagaagcagattcacttgcgctcgttgatgccgattcacttgcacttgtcgatgccgattcacttgcgcttgtggatgcggactcacttgcactcgttgatgcactttcgcttgcacttgtggatgcggattcgctggcactagtagaagcagattcacttgcgctcgttgatgccgattcacttgcacttgtcgatgccgattcacttgcacttgttgaagcagattcacttgcgctcgttgaggccgattcgctggcactcgttgatgccgattcgctagcactagtagaagctgattcacttgcgctcgttgatgccgattcacttgcacttgtcgatgccgattcactggcgcttgtggatgcggactcacttgcactcgttgatgcactttcacttgcacttgtggatgcggattcgctggcacttgtcgatgccgattcactggcgcttgttgatgcggactcacttgcactcgttgatgcactttcacttgcacttgtggatgcggattcgctggcactagtagaagctgactcacttgcacttgttgaagccgattcactggcgctcgttgatgcactttcacttgtgcttgttgaagccgactcacttgcgctcgttgatgcactttcacttgcgctcgttgatgccgattcactagcactagtagaagctgattcactggcgcttgttgatgcagattcgctggcacttgtcgatgccgattcgctagcactagtagaagctgattcacttgcgctcgttgatgccgattcgctagcacttgtcgaagctgattcactggcactcgttgatgcactttcacttgcactcgttgatgccgattcgctagcacttgtcgaagctgattcacttgcgctcgttgatgctgattcactggcgcttgttgaagccgactcacttgcgctcgttgatgcactttcacttgcgctcgttgatgccgattcactagcactagtagaagctgattcactggcgcttgtcgatgccgattcgctagcacttgtcgaagctgattcacttgcactcgttgatgctgattcacttgcacttgtcgatgctgattcacttgcgctcgttgatgctgattcgctggcacttgtcgatgccgattcacttgcgcttgttgaagctgattcacttgcgcttgttgatgcggattcgcttgcactcgttgatgcactttcacttgcgctcgttgatgccgattcgctggcgctcgttgatgcactttcacttacgctcgttgatgcactttcacttacgctcgttgatgcactttcacttacgctcgttgatgcactttcacttacgctcgttgatgcactttcacttacgctttttgatgccgattcgctggcactcctcgttgaagcggattcgctggcactcctcgttgaagcggattcacttacgctcgttgatgcgctagtcgaagtactcgtcgaggtggattcctgttcactcttactcgtcaattgacttggaatcgtcgaatcaactgaatgagtatcctgatcgtagttgtagacttcttgaccaaccaattgaccttgcaagtttttccaagtatcttgccaagagttaataattgcataaccaccagaaaatgccccattataatttcctgctgcaagattagcttggtcagcattactatgttgagtcgtaaaggtaactgtaaaagaagcattcatggtgttgttattatctccccaagattggaaatacatagccgtcccaattgtgtccttattgaaaccagtggtaaatggtgctgtgtttaccacaatatctttggtattttgtttgtctcgtactgttgcttcatcaaattcattattataagcaaaagaataaccaattttatcatctttatagcttcccttgcccgaaaagaccgagttatcaaagtcgctatttgacatatgccaaatatctgcataccgaccatattgatagaaatcattcttgacgtcactaattactccatttgtcttattaacgttctctggcttaaatgtgatatcattttctggattgacatcccctgaattgagatcacttggcgattttcgtaccttcagaccacttgttagtccattattacccaaatggctgtaagtcgttcctggttgtaagctaatatggacattcacatcgctaatgattttgtaatccttagttaggtaaaaacccatttggccatttctcaaaccataattaagaggattgtaaccttcataccatatcccttttttaggatagaaggtaactgtccactcggtttttccattacctaggtcttttgtctgtatattaacgttgttcttagcataatcagtagtttgaccagtatcccgagtagtataagcattgatatcccaccataatcggttgtttttatctccggcaatccacttgtatttatcgttgccattacttccccaataagcaggcgtatcccccggtttcgtattggtatcgggcgtccccaaccccgagctggctgggatatttgccaacaccattgtgcccaattggttgggctcgaacaccgtcatcaacgattgcaattcactcaaaccatggctggcatcactttcactgacttggttcttggccaagacgtcttggtagtgcgcaatggccgcttggtaggcttgctgatagtcgctggccgcatttttgtaactgtccgtggccataaaggtattcgcctgagctaccagttgctttaatcggtcaacattcgacgtggtcggcgctgtcgtatccaccaggctgttcgcattaatcgtttgactggttgcactcgtggccgtccccgacatcgtttggctggtggtactcgtcgtgctggccgattccttgaccgaagtcgaattgctggttaaggacgtactggtactcgtggcggacgtcgacgtgctggtttcactagtggatagtgagcccgaagtactggtcacttggctcgtagtgccttgattgttggaggaagtcaaactaacttgatcggtatttgccaaggcactgttcgcggcattattcgtggccgtcgtttggacccccgtggtcgtggccgccaacgctccggttgaagcaaccgtgccgcccccaatcattgccccggcggctaagacccctttcagcaaggtcgccgactttgaatccaagttcgcttctgattcatccaattgcaccttgtgtggtgccgaatgcgttgcgatctttagtaaacccacccgggttaacaaacattgcacccattgcttccctgacttgtacaattttacccgagtagtccgggagctttcggtgatcgtttccttttttgtccgtttcaagatcccacgtcctttcatttctttatgtacgcttctagtcagttgccttgcgctcaatatttatcaattgattaacccgtcctgcgacgctcgtcccaatttcaaacatttccgctaatcaggttaatcgcgagataaccatttctattatcactataagcactttattcattcgctttcatcagcttttcattgatcatatttaaaatgcttaataggtgttaaatagatagtaatctttttcaacatatttatcaacgggatattaaaaaaacttacaatttatttaaatattaatacctactgagtgatcaatatttataacttgaatcataattttgagtgctttttctcccgccacagccccgagtcttagggggccattgcgtcaatttatcaatggtctaggtggtgttttcaccactcattagcttcatcatcttgttatgtaggaatggtctattttagcttatgataatttataatttttcgccgggggccggccgaccattaattttgcccttggtaccaacaaccgaatgtattgatcgggttacattttgctcccctggttccgactaaagataattaacccatccccggagtcaaacttgctttggcgcgggtcaaccatcccgtcgacatattttctcatcgaattctcatttaagtcttttcaatcccagcgaaacctgctatgctaaccccactagctgcaaagcatgctcaaacaactggattggaggagatcatatgcgcaaaattactgtgaattcggactttaccttgccagtccgcagtgaaaaacaaatcgccagcaacgttttgaaaggctcgctggggaacctgatcgaatggttcgattggtacgtctacgcttcctttgctatctacttttcgggcgcattctttcccgctcacaaccccacggcccaactcctagctgccgcgggggtctttgcgatcggctttttcatgcggccgcttggttcgttaataatggggcgcctggctgatcgccatggccgccgtacggccctaactatttcagttgtaatcatggcaacgggctccttgatcattgcgttcgtcccgacctatgctaccattggcatctggtcgcccctgattttgattgccacccgcttattgcagggcctgtcgctcgggggcgaatacggaacctcagcgacctacctgtcggaaatggccagtccgcaccaccgcggcttttacgcttcctttcaatatgtcaccctgattgcagggcaactgttcgccttgctggtgcaaattgtcctgcaaagtttctacaccaatgcccaactgaccgcctttggcattagggccatcggggccttggtcattgtgtcggggtacacctcagcttttaagagtttcgttttccttttttagctctttaagcttagactgatttgcttgataatttgcttctaatttttcaatttcatcattcaacttagcaagagtattaggagtaagtaccattcctgcaagcatcttaccttgctgaagagtaattgtttttttggctttgtcgttcacagataataaatattcataattatctaaaaattgacttaatgaaaccatataggtttcatgtaaatgttttcttagcatttaacttgccttcgctttctaaaaatttgttaaggctatttgccttaacaaacttattctaattggcagattgcaagaaataacttgaacgaatttagtgacgtaggttaagcaagaagatctcgattggtgtgcgccagttaagacatttaagtggccaggaattcagataccaactgatttgaaccagctggcgatcgctcagctcttcaatagcttgtcccttgggaataaatcgtcgcaaaattcggttacggttctcattactaccgcgttcgtgcggtgaataggcatgggcaaagtaaacctgagtacccgttagctgttcaattgcctgataattagcgaactctttaccatgatctacggtcagcgtcttgagcttgtcttgaagttgactagctagttcaagtacggcttgagtcatgaactgactgtcgcggccatggagccgtttaacaattgtcaggcgactcttacgctccacaaaagtagccacagcttgacctttacgtttgccagaaagtacggtatcagcttcaaagtggccgaactcctggcgagtttcgactttatgaggacgctcctcaatggagcggccgtgactgaacgtaccccgcttttctttagcacgatgacgacgaattccatgatcaggcaaatcgggtagctgtacatcaagccagccttgatcaatccagttatagaccgtcttgtaggcaatccccaccacatgggtaacttgttcaggggaccacttctggacttgaatcttttcctcaatcaagtgcttaaggcttttagtgagcgaagacttccacccccgttgactaaccttgcgttcaaagtcagtttgcgctagctcagcccggtactcactatttagccggtgaagttcgttaaagatggtggtcttactaaagcctaagtagttagcgatgtatcgcaaggaacgtccttcactaagcgtttcaatgacaacacggttctggaatgataaaatagcggtgctcatcaaggtccttctttctaatggattgtgtggtaacaccattaaagaccttgatggttttttctgtccacttaaatgttcaacttaaattttacaatctgccataaagaaaaatcctcctgtactgaatggtatattttcagtataggaggattggtcgaccgcgcctagacgtgtcgttattgactgcttaccgtttgttggctactaaaaagggcccgaccctaaccgtaattggttagggccgggccctttcttatgcgttgcgcggtggtaaattaattaccttagtcttcgcgcttcttcttcagaccgagcaagccgaggaaggctacgcccagcccactcaacattgcccacgtagctggttggtccccagtctgtggcaagtgttgttgtgcttgttgcttagttgcggtttggttcgttgacgttgcgcccttcgtttggccaccattggtcccaacacctggctttatcgccgagccagtagtcgcttcagtcacgtgcttgtgcaggtttgcctgcagcgtggtcgtgctaccgtccgcaaaggtaacttgtacgttcccggcggtatcaaccgtgatcgtcgcaattggggccgttgggttggtcgtctgaattgcttccttgacttggtcttgttcggcttgcgtcaagtggttcggatcaaccacgttgaccgcttgcccagggttcagtgggtatttatccgcatccgtcttgcccgttaccaagtcgtgacctgaaatcgtattcgtggagccatccgggtacgtgatggtcgtcgtcccatcgtcaccgaccgtgaccttcgtcccatccggcaggttcgagttcgcttcgtcaaccttgtccttaacggcgttcttttcattatccgttaacttggttgggtcatcaaccttcaccttgtcaccgcctggtacgtttggcgtgttcttatcagcgtcactcttgccttcaatgacctggtcacctgggatcgtgtccttcgagccatctgggtaggtgatcgttacgtcaccgttgtcactgaccgtgaccttgctaccttctggcagcgtcgacttgccattctcatccttgttggcgtctttaatggcttgttcaacatcggacttttcatcttccattaacttgttcgggtcatcgaccttcaccttgtcgcccggtaccttcggttcgttcttgtcggcatcagtttggccttccgtacccttaccttcaacgaccttgtcccctgggatcgtgtccttggagccatctgggtaggtaactgttacgtcgtcgttgtcgccgaccgtaaccttgctaccttctggcagcgtcgacttgccattctcatccttgttggcgtctttaatggcttgttcaacatcggacttttcatcttccgttaacttggttgggtcatcgaccttcaccttgtcgcccggtaccttcggttcgttcttgtcggcatcagtttggccttccgtacccctaccttcaacgaccttgtcccctgggatcgtgtccttggagccatctgggtaggtaactgttacgtcgccgttgtcgccgaccgtaaccttgctgccttctggcaacgttgacttgccattctcatccttgttggcgtcttcgacggctttaactacttccgacttttcgtcttccgttaacttgttcgggtcatcgaccttcaccttgtcgcccggtaccttcggttcgttcttgtcggcatcagtttggccttccgtacccttaccttcaacgaccttgtcccctgggatcgtgtccttggagccatctgggtaggtaactgttacgtcgccgttgtcgccgaccgtaaccttgctgccttctggcaacgttgacttgccattctcatccttgttggcgtcttcgacggctttaactacttccgacttttcgtcttccgttaacttgttcgggtcatcgaccttcaccttgtcgcccggtaccttcggttcgttcttgtcggcatcagtttggccttccgtacccttaccttcaacgaccttgtcccctgggatcgtgtccttggagccatctgggtaggtaactgttacgtcgccgttgtcgccgaccgtaaccttgctgccttctggcaacgttgacttgccattctcatccttgttggcgtcttcgacggctttaactacttccgacttttcgtcttccgttaacttgttcgggtcatcgaccttcaccttgtcgcccggcacctttggttcattcttggcggcatcgctcttgccttccaccactttgtcccctgggatcgtgtcgactgaattgtctgggtaggtaatagtggtatctccattgtcacccacagcaatcttggttccttctggtaagccggtgttgtgatcacgaatgttgtcttcgacttctttcttttcgtcattagtcagcttcgttggatcatcaaccttggtcttggctggaaccgttggatccagcttttcagcactagtcttttcttcaaccagctgattaccttcgatagtgtcgactgacttgtctgggtaggtaatagtggtatctccattgtcacccacagcaatcttggttccttctggtaagccagtgttgtgatcacgaatgttgtcttcgacttctttcttttcgtcattagtcagcttcgttggatcatcaaccttggtcttggctggaaccgttggatccagcttttcagcactagtcttttcttcaaccagctgattaccttcgatagtgtcgactgacttgtctgggtaggtaattgtagcttttccatcattagctacggtgacacccgttccttctgggaacttatccttattagcttcaacaatcttatcttcgatcgtcttcttttcatcagccgttaagctggttggattatcaaccttggtcttggctggaaccgttggatccagcttttcagcactagtcttttcttcaaccagctgattaccttcgatagtgtcgactgacttgtctgggtaggtaattgtagcttttccatcattagctacggtgacacccgttccttctgggaacttatccttattagcttcaacaatcttatcttcgatcgtcttcttttcatcagccgttaagctggttggattatcaaccttggtcttggctggaaccgttggatccagcttttcagcactagtcttttcttcaaccagctgattaccttcgatagtgtcaactgacttgtctgggtaggtaattgtagcttttccatcattagctacggtgacacccgttccttctgggaacttatccttattagcttcaacaatcttatcttcgatcgtcttcttttcatcagccgttaagctggttggattatcaaccttggtcttggctggaaccgttggatccagcttttcagcactagtcttttcttcaaccagctgattaccttcgatagtgtcgactgacttgtctgggtaggtaattgtagcttttccatcattagctacggtgacacccgttccttctgggaacttatccttattagcttcaacaatcttatcttcgatcgtcttcttttcatcagccgttaagctggttggattatcaaccttggtcttggctggaaccgttggatccagcttttcagcactagtcttttcttcaaccagctgattaccttcgatagtgtcgactgacttgtctgggtaggtaattgtagcttttccatcattagctacggtgacacccgttccttctgggaacttatccttattagcttcaacaatcttatcttcgatcgtcttcttttcatcagccgttaagctggttggattatcaaccttggtcttggctggaaccgttggatccagcttttcagcactagtcttttcttcaaccagctgattaccttcgatagtgtcaactgacttgtctgggtaggtaattgtagcttttccatcattagctacggtgacacccgttccttctgggaacttatccttattagcttcaacaatcttatcttcgatcgtcttcttttcatcagccgttaagctggttggattatcaaccttggtcttggctggaaccgttggatccagcttttcagcactagtcttttcttcaaccagctgattaccttcgatagtgtcgactgacttgtctgggtaggtaattgtagcttttccatcattagctacggtgacacccgttccttctgggaacttatccttattagcttcaacaatcttatcttcgatcgtcttcttttcatcagccgttaagctggttggattatcaaccttggtcttggctggaaccgttggatccagcttttcagcactagtcttttcttcaaccagctgattaccttcgatagtgtcgactgacttgtctgggtaggtaattgtagcttttccatcattagctacggtgacacccgttccttctgggaacttatccttattagcttcaacaatcttatcttcgatcgtcttcttttcatcagccgttaagctggttggattatcaaccttggtcttggctggaaccgttggatccagcttttcagcactagtcttttcttcaaccagctgattaccttcgatagtgtcgactgacttgtctgggtaggtaattgtagcttttccatcattagctacggtgacacccgttccttctgggaacttatccttattagcttcaacaatcttatcttcgatcgtcttcttttcatcagccgttaagctggttggattatcaaccttggtcttggctggaaccgttggatccagcttttcagcactagtcttttcttcaaccagctgattaccttcgatagtgtcgactgacttgtctgggtaggtaattgtagcttttccatcattagctacggtgacacccgttccttctgggaacttatccttattagcttcaacaatcttatcttcgatcgtcttcttttcatcagccgttaagctggttggattatcaaccttggtcttggctggaaccgttggatccagctctgctgaagtctttttgactacatacacatattcatcgtgatgatcaatagtatatgttccatttacagtatttgcttgattggtcgccaaattatagtccgttggtaaattgacatcataattataattttctcccaatttaccactaatcttatctgttgctacttcttccccatctcccggcacaaaaatagaatttttactcccagttacatcgatataatgaactctaacttcagacttatcttcactaccatcctttgcataatagtaaacaataccatcattagttgatgtaatctgatttatatatgtgtaccattttccatgcgaaataaacgacatgcgatcgttaacatttaacttgttccccaagtaacgtgtcgtattattaagcacttcaccatcataatacgcagtaactcgaaccaacccttgagcgtcaattactgtttgctttataactacatgtttatcaagtctaaaatcatacgattcacccactttatatggggagatatatcctgtggtctctggcgattttttcaatgtatatccatcaatagttggtgcctctccggtaattgtgtatttctgataagcaacaccttcaaaagattttggcactgcaatttcgtctcccgttgcttgatcaatataatgaatcgtagttgtcattttcgttggtattggagtcatcacaaagccatttcccattgaagctgggtctcccttaattccggtattgtgaccatatgcaaaaccaaccaccatgccatatatattatcgcctttttcgatcccatcaagatcaattgaagcactagtcccatcataattagtaaaaattggagtatgagtagttccactatactcaaccttctttgattcaccaggtgctaccactgcttcttgtatatttttacccaatccagtatgcaaaattgttacatataaactattatcattcaaattatttgagcgggccaacaaatagatagcatggtaatgttcattatagttagcaacaccggcaaagtagtatctcccgctctcatcgttggcagtgtggttttgtaagatttcctttattttttctgttgaagtgtcctgataccacttcaggttattgtatacccagttatccgtgggcttattaattatctccgttaacatgggctgggaatccagcttaatgtcttggtttgaaatcggtaagctagcagtacctgccaccttcattactggtcgtgcagccagtactttaaacttggcggctgtaaacttggcggttgtaaacttggcggttgtaaacttggcggttatcttttgtgtagttggtgttgttgcgtcgttagccggcgttacttcagtatcttttttgtcgacattggtagtattttgcgtagtatcttggccttgcggagtatcttggtgatttgttgcctcttcagtatcggttgtaggtacttgctgatttacattttggccatttgcttgtttatctgtactatctccactagtctgcggcgtagatgttgtaccttctgttgtaccttcagtaaccttgtccttattgcccccttgagtcgtggtacttcgtgttacatcatcactaggactagtaacagtatctgctaataccgcatggttgccatatagcataaaagttgtccccaacaatactgatgctactcctacagataacttccgtattccccaacgttgcttcctttcggcatgcttttgttggtagaattgatgattgtttttcgaaaccatatccgttcctcctaagctcataaaatatatatacttatcacactcttagtgtatcatatacttcgtataaatctatcaaaaaaacgattcctaaatttcaagaataagttagccactggactcaaataaataatactgatcaattgattattggtcgatggagctgtgatatctcttggtagaaggccttacgatagatatccattgacgaatgtccattaaacatagctcgtggatagtgattcatccaatcattagtcgctatgatctgagcactactatagttatttataacttcacctttggtaatctccttgcggagaaaccggttattgatctcattggatccgcgttcccaaggagaatatgggtcagtgtaaaaaacatggtcatgaactcgcgttaactcactaaattcagaaccattatcagaagtaattgttttaaaaatgcgatagtaagcattcttgccaagcttctgacgcaactcaacaaaaaaatgattcactgcatatgcagttttactggtaatttttctcgtaatattaacccgtgaaaaacgatcagtcattactagaacaacgctatccttgccatctttatgaccttgaatagtgtctagttcccaatgaccaatttcggaccgttggtccgcaacctgtggacgttgagcaatgttaggtcctaagcactttttggcttgtgaatgagattgatggtgtttacgtttagttttctcaaaaaggtccaagttagacgtacggaatacaccatcattaatccactgatacaaagtcacaacagacttagggatcagtgaatcatcactcatcaaatcacgtgccttataaatagccgcttgaggagagtaacgatgctcatcaaattcaccaagcattaattggtcggccaattgtaaaaaacgctttgagcggtaatataaacgaggacgaccggaccgttggtggcatttaagataaatattctgaccagcttcataactgtagatgtgataagggtaatcgtaagtcttaccattgaatttttgacgacgaatttggcgaactgtaccacgtttaagctcattattaatggtttggtggttcactcctaattgacgaccgattgcgcgattggaaagtccttgcgactttaaagtcgcaatcatcactctctcttctttagtaaggtgtgcatatttgcgataagtggccaaaaggttagtgagcatggtatcatttaagtgcgtcatttgacggacatcctttcatatagttttgattcacttaatatgatacctgatgtcacgccgaatggcgtttttgcatttaccaccaattaggtggctaacttcattctataatccaccgttttaatatctttttgaaagcgtcttccaatcgctaaccaactaatagttaattttcttaagtcagtagggaaaatgggcccaccatgcggcccgaagccacaaaaaaagccccccgccagcagcaatcaggccgcaagcggggggcttttcggtgggggccgaggcctcaaccaatcccttataagttgctaaaatcagttttatctaaatctgtatccgggttaacttttggccaactgtcaaagtgccgcaaccaccatttgtaattatcgtcggcgacttggtagaacaagcccgtggacgagatccggtacttggtaaagccgttgccgacttgatccatcgtgccaatgattggcaccccatagaagtactggtggtccatgtcaataatcgtggtaaagtgcccactcttggcctctttgtcggtaaagaagccttcaaagtacttaatcccttccatcaggactaagcgtgattccatatcggccaagtactccggcgttaaatgttgcgaaattaccggtggattcccggacggataagtgttttcgttgtaccccgccgtcatggtatgcggcgccaacaacacggcaatcgatcccaagtgggagtaaccggcaaattgcggcatcagcccagcttggtattccgctaacgcatgcacggccaacattgccttgcgcttatcattgaggggcgctaattccaaggggtgttcaccgatggcaaagcgcatcaagttgacggtctttaacatccgctgactgtaagcatccgccaaattgaggagcggctttaacgcggccacatcggcatccgttggcaccgtccgaatcgccttggtgacatccccattgatcgcatcctggccaccacggccggcttccagttccacttgcaattgtccctttaagcggtccaccgtggccaccagctgatcataagcaggggtccccacttgcaagtaatctccaaccgttcggtattgcagatattccggatccagcggggccccttcataaacgctcccttggtatggcaaggtcgcattgactaattcggcccgttccacaactttcttcagtgtggtcgtgagtttgtagtgttcgtcagcatattggacataggtactggttcccggcacctgctcggccattagttgctccaaagcttcttgccgccgcacattattgtccgcgatcaatttatccgcggccgcttgggcggcttccgcactggtcaagacctcctgtaatgtggccgcttgactttcatactgataggcctggtcgggatcggccagcatcgcttgcgcgcccttgatgaagtcattgacccggttgatttcattgtataaggtcaaccgcgtcgcaactaagttttgcaaggcgatcacggcggcttccaaatcgcgccgcccctgcatttgttgggccgaactttggatatataaatccatccatcgtttcagtgacgcctgattatcctgaatcccttgcgtggtataagtctttagatttggtaagacattgatcccgtatgcttgcaagatgccttctgcggcctggcggtattcaggactgacatactgcaaggccgtttgatagtaggcgaccgtagctttaaattcattgatcgcatccactttggcctgctcggcgggactcaaaatcgcgccgtctaatttggcctgggtggcctcaacttgcgccacggcggcatccagcatcgcctgcgtcaccgctggcgtggtcatcagtttttgtaaggccgccacggcttcgtcatacggggcttgagccgtcgtcgtggcattgtgataccgcggatcttgttcccgttggtcataccgcttcagcaaaaccgtcgccacgttaaagtccgtagcctgaccatccaacgcagcttgagccgcatcgatttgcgcgatggcggcctgcatttgctccgccgtaacttgcggatcgtattgcaactggctcgcggctgctaaagcggtccggtaagctaattgcttggcagcatccgcattgtaatacgcggccgttgtcatcacgctttgacccgttaacaaccgccgttgtaacggttggagatcaattttcggttgagggcgaggggttggtttcacctcgtcgatcgactggggttgctcgtcgctggccccagaaccagacgttgggttgtcaccactcgtggctggtgtgtctgtcccagacgttggcgttttgctggctgtgctactgtccgacgtggctggtgcttccccacctggcgttgcactggtcgttggattgtcaccgctcgtggccggcgtgtccgtcccggacgttggcgtttcacccgctgtgccactatccgacgtggctggtgtgtctgtcccagacgttggcgttttgctggctgtactactgtccgacgtggctggtgcttccccacctggcgttgcactggtcgttggattgttaccgctcgtggccggcgtgtccgtcccggacgttggcgtttcacccgctgtgccactatccgacgtggctggtgcttccccacctggcgtcgcgctggtcgttggattgtcaccgctcgtggccggcgtgtccgtcccggagcttggcgtttcgcccgctgaggcactagctgacgtggctggtgcttccccacctggcgttgcactggtcgttgggttgtcaccactcgtggccggcgtttctgtcccggacgttggtgtttcacccactgaaccactatccgacgtggctggtacttccccgcctggcgttgcactggtcattggattgtcgccgctcgtggccggtgtgtccgtcccggacgttggcgtttcgctcgctgaagtactgccggacgttgccggtgcttccccacctggcgttacactggtcgttgggttgtcgccgctcgtggccggcgtgtccgtcccagagcttggcgcttcacccgctgaaccactgtccgacgtggctggtgcttccccacctggcgttgcactggtcgttgggttatcaccactcgtggctggtgtgtctgtcccagacgttggcgttttgctggctgtgctactgtccgacgtggctggtgcttccccacctggcgttgcactggtcgttggattgtcaccgctcgtggccggcgtgtccgtcccggacgttggcgtttcacccgctgtgccactatccgacgtggctggtgcttccccacctggcgttgcactggtcgttgggttgtcaccactcgtggccggcgtttctgtcccggacgttggtgtttcacccactgaaccactatccgacgttgctggtacttccccgcctggcgttgcactggtcgttggattgtcgccgctcgtggccggtgtgtccgtcccggatgttggtgtttcacccgctgaggcactgctggacgtcgccggtgtttccccgcctggcgtcgcgctggtcgttgggtgctcgccgctcgttaccggcgtgtccgtcccggacgttggcgtttcacccgctgaaccactgtccgacgtggctggtgcttccccacctggcgttgcactggtcgttgggttatcaccactcgtggctggtgtgtctgtcccagacgttggcgttttgctggctgtgctactgtccgacgtggctggtgcttccccacctggcgttgcactggtcgttggattgtcaccgctcgtggccggcgtttctgtcccggacgttggtgtttcacccactgaaccactatccgacgttgctggtacttccccgcctggcattgcactggtcgttggattgtcgtcgctcgtggccggtgtgtccgtcccggacgttggtgtttcacccgctacgccactgtccgacgttgctggtgcttccccgcctagtgttgcactggtcgttggattgtcgccgctcgtggccggtgtgtccgtctcggatgttggcgtttcgctggctgtgctactgtccgacgttgccggtgcttccccgcctggcgttgcacttgacgttgggttgtcgccgctcgttaccggtgtgtccgtcccggatgttggcgtttcgctcgctgagccactagctgacgttgcgggtacttccccacctggcgtcacactgaccgttggcttgtcacccttcgtggttggctgactcccttgatcaagcggggtggccgccattcccaggccaccaaaagtcccgatcggctcactgctccggcctgaactgacttgcggccacaggatcgcattggtcgttccgattggggtccgccagacttgcggtggcaagtttcgatcaatcagtttccgaccatccggcgtagtcatcgtcacgtggttgccgcgaatctttacgaccgttcccaccgggatgtggtactgatctccttcgtgcaaaccattccactccatcaaagtatggtaatcaatccccaaaacttgcgccaaggcccacaaagtgtcacccgcccggaaagtataggtttgatccgttggcgcaatgcggggcgcaatctccgccggcgtcgtcgctcgccacggtaacaagctcgccgcatcaatcgtggttaggcctaagcctaaggtaaacgcggttaagtcaatcgcaatccaatggtttcctttcttaactaacttgacccggtacaaccggtcagcaatcatttgatatttatgttccatttttctcccccttattttaaggataatttaaccaatggccactctgcttcaagttaattctaacttaatttcttgcttttttcacttattacgcgaaaaaagaggctgatcagcgatcaagcccctttcctcattggctaaattattcttttcgtttccgcttgctcaggcccaacaaccctagaacgccgagcaacgtcaagcccagcacacttgtttcagacgtttggttccccgtctgtggcagttcttgccttgccgttggggttccttggcccgaaggggtcgacgttgattgactcggtgccgttggttgagcaggctgcgatggtcctaccggttggactggttgaactgacggcgtaatctcaccaccgttggtcgtcttcaagtagtagaagatgacctcggtcaagcgaccatcggcccctttgatttcccgacgttcaaattggtgaccagtaatcactttgtggtattcatcaaaattcgtggccccgttcccctcaacgatgatcgaatccgcaattgaatgcccattttcatcataaatgttaaaaatataaatttatccccataatttgctattaaacccatttaccaatagctagataaataaatcatctttgttataacttatttcctgatcgagtaactaacttttcgctcttaatctttccaaagcttattcaaaaacccatcaaaaaaaaacgccaaacccccttgaatgggtttggcgttttagtcaactaaatttcgtttagccttcatcttttggcgtttgccgcttcttcttccgacccagcaatccggccaacagcaagcccaaaccacccagcagcccaccttggttggtagtggctccagtttggggcagcttgcccttgctcttgtcacgctgcgcggcggcttggtccgttgccgtttgatcccgcaagctgactggagcgctttgcccatgcttagttgccgacgtggacgatgtgagcgacgtggacgtgaagtcaatttcttcagaagcgtaatcatgcagtcccttcaatgagtcactttgtgaagtggacatgctcatcgattagatgcccgattgggaatcaaccttctgactttcgctggccgaaagactgtccgaagctaacgaagcacttgtcgaagctgacgttgaggcactcgtcgaagcactcgtggatgcgcttgttgacgcactcgtcgaagctgacgtcgaggcactcgttgacgcactagtagatgcactcgtcgaagcactcgttgacgcactcgtcgaagcgctggttgaggctgacgtcgatgcgctcgttgacgcactcgttgatgcactcgtcgaagcactagtagatgcgctagtcgaagcactcgtcgaggcactcgtggatgcgcttgttgacgcactcgtcgaagctgacgtcgaggcactcgttgacatgctttgactttgtaccgtgctcaatgacgcactttcactttgtgctgcacttaacgattcacttgtactaatagattccgactcttgccttttgcttgtactagtagattccgatttcttcagggaatgactagtgctagcactctccagttgacttggaatcgtcgaatcaatcgtcttattgtccttatttaaattataaacttcctgtcctactaactcaccttgtaaattcttccacccatcttggtaggagttagcaatcgcatagacccccgagaaagatcctttattagcccctgccgctaatttggcctgatcagcattactatgtttcgtcgtaaaagtaatcgtgtaagaagcgttttgtcccccggtcgtattcccccacgattggagatacatagccgtcccaatcgtactcttatcaaaggaagtcgtaaatggcgcggttccatttactaaatcaaatgatggcggattccctccaacatttgcgttatccatttcgttactataagcaaaagcatcaccatttttatcgcttccccggcccgaaaagaccgagttatcaaagtcgctacttgacatatgccaaatatcggcataccgcccgaagtgatagtacagattcgtggtgttaccgattaccccgtttgttggattaacgtccctgggcttaaatgagatgtctgattttggattgacgttccctgagtcgggatcatccgctgaatcccgcaccttcacaccgcccccggtcccttccagttggtaggtcgttcccgggatcatgctggtgtggatattcacatcaccaatgatttggtagtccttggttaggtaaaagcccatttgaccttgttgtagtgggtatttagaagccgctccccagcccttgtaccagaccccctggccgggataaaaggtaatcttccattttgtatacccgtcccccaagtcgcttttttcgactttaatattttccggtgcattatatagttgtttatcattgtcattaccaatagaattattacgcgcggtataggcatttaagttcgtccacagtcgatccgaccctacgatccacttataattaccgttccacaaagccgctgtatcaccagttgctgtattatcatctggcgttaaaaagttgtcactccctgtggctgaattagcatcaaaaagggccatttgagtggccaattgttcaggcgtgatcccagcatcgatcaccgtcatcaacgattgcaattcacttaaaccgtagctggcatcactttcagtgacttgattcttggccaagacggcttggtattgggcaatcgccgcttggtaggcttgctgatagacactggccgcgttcttgtaactgtccgtggccataaaggtgttggcttgggccaccagttgctttaattggtcgacctgcgatgtggtcgtcgtcgccgtggttgccatcaggctatcggtgctcatcgtctgactggtcgtactcgtggtcgtttggctgttggtactcgtcgtgctggccgattccttggccgaagtcgaattgctggttaaggacgcactggtactcgtggcggacgtcgacgtgctagtttcactagtggatagtgagcccgaagtactggtcacttgattgttggcggaagtcaaactaactcgatcagtattcgctaaggcactggccgcggcattattcgtggccgtcgtttggacccccgtggtcgtggccgccaacgctccggttgaagcaaccgtgccgccccccaatcattgccccggcggctaagacccctttcagcaaggtcgccgactttgaatccaagttcgcttctgattcatccaattgcaccttgtgtggtgccgaatgcgttgcgatctttagtaaacccacccgggttaacaaacattgcacccattgcttccctgacttgtacaattttacccgagtagtccgggagctttcggtgatcgtttccttttttgtccgtttcaagatcccacgtcctttcatttctttatgtacgcttctagtcagttgccttgcgctcaatatttatcaattgattaacccgtcctgcgacgctcgtcccaatttcaaacattcttgtcagagatattccacgattacgtttagttaataatttcagcgctttctttactcgttgttgcgactgtttagctggacgggcgtaggccccattgtggtctacacccaacgaaaagccaagaaacttcaaccgtagagggctaccgactttggttttatctgggttcactttaactttcaagcgcttttctagaaactgggtaatgcttcgcattactcgttctccggctcgttgacttttaacatagatattacaatcatccgcatagcgcacaaagtgatgaccacgtctagtcaactctttgtccaactcatttagatagatgttcgccagtagtggtgacaatggccctccttgtggggttcctttttcactcttagcgaaaagcccatggtctaagactccgctagttagaaacttacgaatgagtcttagtgtccatgggtcatcaatatattgttggagatacttaatcattaagtcatgattaacgttatcaaaataggcttttaggtctaagtcgacaactcttcgatagccttgattataaagatctactacttttgcaatagcgtcatgggccccacggtggggacggaagccaaaactattatcagagaaaacacgctcaaagataggcgtaagaatttgggctacaacttgttgaaccattcggtccaccacagttggtattccaagtcttcttactccaccattaggcttcggaatttctacccgtttgactggtgctggtttatacttgccctcacgcaaactagcgatcagttccatcttattttctctgagatatggcagaaggtcattgactgtcatatcgtcaatgcctgctgctcctttatttctcttaactcgcaaataagcctgattaaggttattgcgatccaagactaagtcttggatagtgacactcatacctttaccttcaccataaccggtactacgcgcccttgtgtactttcggttttccaaacctatcctcgacaagcggtcagcttgttgttctgttttctgcgatcgtcgcacctgattacacctccgatataagttacaagttattgtcgttcagtccttaatctgattactcaaactactatgacctcggctgactcctgacttactcaacgctacaccactgtaccgcttgcttctgtggaaatttatcttattcctcttgtcggaagcttgtaagtcaggcctccccgggtaagaatattagctttcgtaccatgtcatcgttagctttactgagaccaacttcgagtagtattggacttcaacttgtctagcagccttatccagttaatttcagccttatagctacttcttgttcatcgatgcagtactttgccttagacttccttcagattccacctcacggtggacacccttgtcctcagctcatggttccgactactacggcccatagcggactttcaccacctagctaatacccatgccgggcgcactacaaaaaaagcacccagctttcacactgggtgctttcgtcatatggcaaacattttggcaaacaaacatgttatttttaatgagttggtcaagttttagcactgccaaaatgccgatatatcgcgcttccaactctaagttacattacaattctattcgtattcgatcgtcgaaggtggcttactcgtaacatcataaagaatgcggttaacgtggtcgacttcatttacgattcggactgagatcttttgaagaatatcccatggaatcttagcgaaatcggctgtcatcccatcaattgaggtaacggcccggatagcaactgcatagtcatatgtccggccatcgcccatgacaccaactgaacgaatacctggtaagacagtaaagtattgccaaatttcttcatcaagacctgcttttttgatttcttcacgaaggattgcatcactttcacgaacaatttcaagcttttcaggagtaatttcaccaataacacgaattccaagacctggacctgggaatggttgacgccataccaattcatgtggaattccaagtttttcaccgagttcacgggtttcatccttaaagagcttgcgtaatggttcaattaacttgaaaccgagcttctttggcaaaccaccaacattatggtgagacttaattgtctgggcggtgtctgttccagattcaattacgtccgtataaagcgtaccttgagctaagaaatcagcatctttaatcttcttggcctcttcgttaaagacttcgataaattccttaccgataatcttccgcttttgttctggatcggtaataccttcaagcttacctaagaagcgatctgctgcgtcaaccttaataatgttaacaccaaggtcgcgactcaacgcatccatcacttggtcagcttcgttcttccgtaacaatccgtggtcaacaaagatacaagtaagttgatcgccaattgccttatgaatcaaaacggcggtaacactggaatcgaccccaccagaaagacctaagataaccctcttatcaccgacttctttgcggatttcatcaatctgcatgtcgatgaagtcatccatcgtccagtttgctttagcgccacaaacatcaaaagcaaagcggcgtaaaatgtctaatccgtattcggaattacgaacttcagtgtggaattgaacaccatagaatttacggtcattatcagcaatcgatgcgattggacagttcttactagtagcagtaacttcaaatccagctggggcttgagttactaaatcaccatgactcatccatacatattgcttctttggcaaacctttgaataatacagcctcgtcatcaagtacttcaatatctgctcgtccatattcggagttatcagctttttcaacctttccgccaaggtcgtatgacattaattgcattccataacaaatacctagaatcgggataccaagcttaaagatttctggatcgaccttgaatgcgtttggatcataaacactattagggccaccagagaagatgatccctttaggattaatctctttgatctcgtctgcggttaacttgtgagaaagcagttcggaataaataccgaaatcacgaagccgacgagtaatcaattgattgtattggctaccaaaatccaagacaatgatcttatcaaacgcatctaaattgatgtttgccacaatgacacttcctttgttcaaatttttattcttaaaggctagtttacaggctgaacatggcatggtcaatgattatttaatattccataacaaaaagacgggagctaaattttctcacgcctttttcgttagatggaattttattgaggatatttaattagtgttctaaatcaatatttaatagacgtaattcttcatcaactgcttgtgcctcaagtgttttagtatctttatcagtttttatcatttcgacagcctcctcatctcatttaatctgtatccttcttaagtggtctgtgagtaattgtcaataaaaatgagtcataaatatcacgtgcaaccgtttcgaacattgatacattaggattaaaaagatttattttttacttttactagatgttttaactagattttctaatgcagaatttgtaatccattccaaattcggttgatttgaatgcgctttctgcatttgataaaatttagttagttattttttacttgaggtgcaatatgtttattcggacaaaatatcttaaccaactaataaacagcatgaaccagtcaacaattaaggttcttgttggcgttcggcggtgtggtaaaacgactattcttgaccagtttcgggcaactctccggcgtcaagaaatttcctcaagtcaaattcaagtgatcaactttgaatatctcctagaaaatgaattatgcaatccagaatatctcttacaatttattcttgatcgacttagtaaacaccagatgaattatatcttccttgatgaagtcgaagtggttccccagtttgcccgcgttgtaaatgccctaaattcactctctaatactgatatctatattacaagttccaacaaaaccattttggagaaagaaaatcttcaacaaatgatttcttatactatcatccccgttttcccttgcagcttccgtgaatacataaaaaggaaccaacaagaagctgattcccaatcgttatatcaatatttaaatgagggcgggttcccctatactcacgaaatccacggtccaatcaacctccgcaattacgtgaatgggatcatcaacacaattattattaccgatttcacccagcaggcgaccctttgcaatccaggcctgactaagcaacttgcccatcacttagctcatcatgctggaaccacacaaaatatctcccaaattgtcgatagtcttaaacgtcaccacatcactacttccaataagacggtcgatttttatttacagttcttacagaggtcctttatcttttacccatgcaaagaatatgatttttcccgtcgccacgtcaaaagtaccaatattcgttattatccggtagatcctagtattcggcaagctctcacactgaaaaagaatgtcctttctcaacgaatccttgaaaatattgtctttattgacttattgagccaaggctatcaagtatatagcggccgcatcaaagataatgagattacctttgtcgcaattaaaaatgatatctttacctgtatccaaatcgcttattcgcttgctgatgatggtgcctatcgccgggcgatcagcggattacggcaactttcctcaaaatataaaaagcttttaattacagtaaaaccagcgctcaattacgctggtttagatcctgatattgaaattattgacttgtatagttggctaaccaattaacctcgtcgcagataaagcttatccacgacatgtcccgttgtcttatgtaaaattacgtcagcacgacttttggttggaaggataaactctcgtaaattaggaaggtcgacgcgttgccaaacatcctttgccattttaaatgcttcctgacggtcacccttcgaataaggatagtaatagtttgatgggtcagtaaaggctgtctctagcaacatcccaaaccgttgaagataccaatgttcaatcaggtccggatctgcgtcaacatacaatgaccagtcaaagtaatcactgacatatagttgctggttacttggcaattgcaacgtgttaatcccttctacaatcaatatgtctgggcgatcaattaccaagggcttatccagctgaacatcataaacttgatgggagtatgtaggcgccttgacaactggttcccctgccttaacatcattaagaaactggaggagcctttccatgtcatatgattcgggaaagcctttccgatccatgatcccccgccgttttaattctgcattaggatataagaacccatccgttgtcattaattctacccgcttatcaggcagcatcttatttagtaagatactaatcaaccgagcgatggtgctcttcccaactgcaaccgaacctgcaataccaataatatatggaatgcgcatcgtggaacgctgtaaaaagtttgccttttgcatctgccattccaaaaagttctggtagcgcagttgaattaattttattagcggcaaatatacatcttgcacatcctcaattgaaattcgatcattcaacgatttaatttcatccaagttcccctgggttaaccgtactgaatcagttgggaaaaagccgtgccatgtttgccgatcaaattgttcgtagttcatccattcatccattatgcaaaatcctttatttcacccgtcaatgaaaacggttactcaagtttaatagtaacatattataaacataattaaagctcaatctagcttgtgaacacctaaacattttaccagataattagcgcagcgcaactgtttgaaataaaaatggagactagtactattactggcctccattttcatttgattatggtttagggaagtttaatttcggataattctttaactctggtgcatcggttgtgtaatcatcgaaagtactctggttattattttccgactttaaacttgtcttctgtttcttttgctgcttctgtaaattcttcaagctcttcttaaggttataagtatattgttttttatcaactttcttaaatcctggaagtttgtagaaccgaagcaagtcaccattcacgactttatctgataatccaagatcagttgtaacgtatttttgaatcttaccaatttctttacgttgcgctgcggtttggtgagtaatctgcttaccattcttagtgtaatagtagtcaccattatacttagtgtattttggcgttacccaatcaccatttctaaacggtacaatttgcttattttctggtgagagcaagtcttggccgaattgaatataattcttagagctaattcctaacaaatcctcaagagtaggtaaaacatcaatttcaccaccatacgtatggttaatgccaccttttaggccaggcatattaatcataaatggtactttttggaacattgctagatcataattagttactttcttcttacctaagatttgcgcaatggctggttggtggttattagagattccatagtggtcaccataaagaactaacacactgttttgccgtaaccccgtcttatcaaggtaatcaagaaattcgccaagtgattcatctaagtatcgtgcagtttgaatataagggtcgaccgtgtcatcaccagtcttccacgcttcgatatccttattctttttatcaagaatatatggatagtggttagtaactgtgatgatctttgcatagaatggttgtggaagctgctcgatatagtgggctgattctttcatgaagatcttatccttcattccatatccagcatcataatccttggtctttgggtaatactccttactaaagaagtattggtaaccaaaagacttataagcattatcacggttccagaaactaggaacatccccgtggaatgaggccgtcgtataacctagtttttgatgaagaagcgctggcgcagattggaaggtattagtcgtcccatcagtaaccattgctgatccttctggaagaccaaatagcgagttttcgagcattgtttctgcatccgccgtctttccttgaccaacttggtggaagaaattatcaaacgccaaagtatcattagcatggtacaacttattcaggttcggcattacttcttgaccatcttctttatagtcgatcatgaattgctggagactttcaaggtgaatgataaaaatattctttcctttagccttaccgtaatattcaacgtttggcgtagcataattactatggatgaaatgcaaaaccggctttaattcgtcacgattagcacgcgcttttactacactgttattagtcgtcttaaccccatcataaactgtatatgcttcgagtcctagatacttaacaatataattattatcaaatgttcgcgtaagtagttgtgaacgatcactttccgccattcctaagttaactccaaatagaacaaagccaagggcagtaatcgtcatcgcatatctaaccttaaagcgtcgcatatcaacacggacaaagtggaaaaataagatgagtgctaaaattacaacatccaggtaaaccaaaaagtcttcgggacgtaatatccccattaaacttttaccaagattatttgaagccgctccagatccctttattacgttaaaggtaatgaaatctgaaaattctcgatagtacaaaatatttgcaaaaagccatgtcgacaatgccgcattaattatcaacatcatccaataggacaagcgtccacggaaatataatgcaattcccaaaaatacaagggcacttggaatcgtattaaatgctaaaaggaattgttgcatgcttccttttacacctaaattaaattcattttgataagcccaatagctctttaaacaaaataaaagtacaacaagcagaaaaaaaccgagcttggtattcaagacacggcggagcttctgcaacgctgttttcatagtcgttcctccataaaaaaatatcattattaacaataatacactaactagctaaccgcaaccgtacaattttatttttccaaaaagttaaaaattctgtcacttttctgtcgtagttaaccttttgaaaatagatcttaaatgttatgattgagtgtcgttaattaacagaagggactgagcaccatttcaaagaaaaaagcgaatttaatgttattactggttgctattctatggggaagcagctatgtatttgccaaactaacgattcaagcagggatgcattctggagttatcaatgcttgccggggaacaatgtgtgtaattgccggttatcttatcttccataaacagatcaacaaaatgacttggctggatttcaaactaggagtccttatgggaacaattaatttcctgggttattttttgcagactgatgctctccgttatactactccggctaaaaatgccttcttgacaaccttatatgttgcaattgctcccttgatcttgtggttgttttggcatgagcgtccacaacggaagacatattttgcggtcgccctcgctattatcggaatggctgtcatcactaatgttgctaatactggccttcaattaaattttggggactttctaactgttgtttctgctattttttgggccttacaattaatcttctttggaaagtacgcaccgaaagtttctagtccctgggtggtaatcttcatgattggcctatgtcaaggcacgttcggttggattacgactggattatttgaacgtactaaccttacacaaattcattgggttcaagccctgattcccctggctattttagcgatcgtcgtaaccttcttagcgcaaggaatgcaaattacagctcagcaatatactgatgctacatctgctggattattattgatgttagaatcattttttgccagcaccatgtcagttatcatgggctatgatccccttacaccacaactaattttgggtggtttaatcttacttttagccaatgcaattatgcaagttaatctccaagatgtgccatttttaagaaaacagaattaaaaataacgaggatgaaaagttttttcatcctcgttatttttatttgcttactttcttatcttccttggcaaccgctgcttgagctagcaagttgacatagttaaatggtcggtcaaagtttggctggaacattgtatcatacattccaagaaactcaattgtattttggttctgaatgcataacgaaatcagacttaaagtttctgaaatatcgtgtttactcatcatctgtgctcccaagattcgttgggtatccttatcccaaaccaatgacatcaggaccggcgtggtagttggtataaagtgcaatattactcttgccatttatttatcaacattaactttttcatattcatctgtcggcacttgggtcagcaaactagttgtcctgccaattgatactaagcttaactcatgcattgctcgagaacaaattgtatatagcaattgtcgctcatcgttaccatggtattgctgatcattcgcattccagacaataaccgcatcaaattccaacccttttgctagatatgccggcacaacaattggcccctttactaaccgttgattctctgtccgaataacggtggtcttgatattattggcatttaacttttgatacaactcttcactgtctttgagatctttaccaataattgcgacggcatcatggtcattctgatacttattaagaatattaataactgccgctaccccttcttgttcatccttagtttgataaacttgtggcttattaccttcacgttcaaaggcttcaattgcttcaccgtcaattaaaatatgcttagtaaagtcggtaatttgtttcgtggaacggtaagacttagttaattggacaaccttcgtcttttctggatcaaacatcgtccctaactgctttaatagtgaccgactattctcatgagtgaaaatcgcctggttaaggtctcctaacaatgtgaatttagcacggggaaaacgatatttaaggtaagctaactggtaagcatcataatcttgaacttcatcaacaaaaacgtaacgaatatcacgttgaccacgctttccagtaatcaaatcatacaggtacaggtaaatggtaattccgtttgcactgatatttcccttctttagctcttcttttatcccatcaacataacctttccattgctctgcagaaataccgtattcagcaatattaacaagttttggagttacccggagaaagtgtaaaaattgtccattgatgttaagccactgattatgatcgatggctttttttattggcataaatgcccgcataacgatttgacgcgcaaggaacttgtattctttatcttcatcctcaaattcacgtggctggttattaaataggttgtcgatttcttctttactcaagctttgaatttcatcctctacccatttgttgcgcatttcagatccaacacggtgattaaggtatttaataagagcttctttcgttccatccaacctatttcccaggttatagttattgttaaatgagtagtaaatctccttaatcttctctttgctcaaaaagactttaccattaaacataaggttgcggaaacgcatattagcatgaccaagatggttagcataacgctctgttgctttgaaatattgtaagctagttaatagttgttgtgcattcttagccgtttcatcttggtgactttcaaaccgttgttctaagttttgaacatgaagctttggtacccgacgattagcaaactggaagtaagtcatctggaccatattatgctcacccaattccggtaaaacttgatcaatgtagtcattaaataattggttaggtgaaaaaagaacaacttgtgaagaggtcaaattcccccggtaacggtaaagaagccaggcaacccgttggagaactgcagctgtctttcccgagccagcagccccctgaacaaacaacaattcatttttagtgtcacgaataatttcattttgtttccgttgaatcgtcgttacaatgctcttcatcttggtacttgaatggttaccaagagcatcaagaagcatctggtcgcctacttgttcgtcggtatcaaagatggttacaatcacgccatctttaatttggaattggcgcttaagagtaagatcaacctcttgttcacctaccggagtctggtacttaactttcccgagctttccttcatagtaaacagacgaaatcggtgctcgccagtcataaacaagaaagtgatctggcttatcggtaaaggatgcaagcccgatatataccttttcggattcattggcacctttttcacgaaaatcaatgcgagcaaagtaaggtttcttttcaagtcgctgtaaagttgctagccggtctgcagcgtgttgccagctattttgacgttcatctagcatctgctgttgagcacgaaaagacatggccgtatccatcatgcctgaataagtagtggtatttaagtggatatcatcaatttgcttattgatgcccttaatatcatgttgagccgttttaatctttttttctgctttttgttcggcctgttttactttatcaatcacattatcaaggtacttttgttctagttctttttcagttttcgtagacattacatactccctacctttcatcttcaggtcgacttacttaataatttatcttaaaatcatccaattattatatcattttcgccaattagtctgttaactttccgccttctattttttcaattattaaatgtcgtttaattttaatcctaagatcatcaaaataactaataataacgctacaatatattgaagccatgatccaggaggaggaaaacaacaatgagccatattttttatcttctaactcatattgcggaaataattattcccatgtttgagtggatgggcgcttggagctatgttctcctttttatcctaatttttatggaaactggattagtgattttcccatggtttcctggtgaatcactcgtctttttaacttgttctttcattgcttttaacccgatcttaaaaatggaaatcgtcatccccgtcttcttttttgcggcgctaattggtgacacagttaattattatattggtcattccctttctcattggcaatggctcaaaaaaagaatggccggtccccgttttgagaaagcacaagaatttttagcccgtcatgggatcaaagctgtagcattagggcgatttgtaccgctcattcgtacctttgtccccttaattgctggaacaatgcagtttccgttccatcgtttcacagttggcaatattatcggcgttactttatgggtagcgattggtgctggatgtggatattactttggaacaattccgtttgttcgtcagcacttctcacttatcatcttagcatttgttgtgtgttcactgttaggagttggcttgttagcacttatcaaagcgattcgtcaacgaattattaagcgaaaccgaatgctataattgctttttcttcagcgaaatcatgttaaaatgtaataagtatttttatttcgcttaaaggagtgctgtaactatgacaatcaacgtttattttgtacgccacggacaaacctatcttaatctctacaatcggatgcaaggttgggctgatggtccgctaacgccaaagggtgaagaagacgctaaacgagtaggacgggcgcttgctcctattcaatttgattatgtattttgcagcgacctcgcacgaacagtttcaactacccgtttcttgcttgctgaacatcctggtaataatccaacgccaattccagagccagcgtttcgggaagaattctttggctactttgaaggagaagatggccaacattttgctgactttcttggcggcccagatggttatcatagctttgcagaaatggttgccggttggggtccagacaaattaaaagataagattgcagccgcggataattatggtactgctgaagaccatgttactttctggaagcgggtagataaaggttttgaccgtttacgagcattgccagacggatcagaagtactagtagtttcacacggagccactattcgttcaatcgtccaacgctattctgacgcttacgatccaggcgattcaccacgtaacggaagcatcactaagctaactttagataagaataatactactgttgatttttataacaaacttgaattaccagaataatatccataaagggggaacactattcttcaatggagactaacatacaaactgcagaaccagtaattatcactggcttaaataccggtcaagaagactttgactactcaatggtcgaactggctgaactagcacaagcaaatcacatggaagttatcgatcggattgatcaagtcatcgatcgtcctaatcctgctacctactttggaaaaggcaaagtcgaagaaattcgtgacgtggctgatgctaatcacgttcctactattattactaatgatgaattatcaccaagccaattacgtaatcttgaagaaggaaccggatgtcgtattctagaccgaaccgctcttattttagagattttcgcaacccgtgcgcaatctagagaagccaaactccaagtacagatcgctaaactgcaataccgtttaccacgattgcaaactagtgcaagtgagcggttagaccagcaaaccggtggaggaagcggctttactaaccggggtgccggagaaaccaaacttgaaatggatcggcgaactatccaacatcaaatttcccaccttcgtcaagaactggctgctattgctaaatctgaacaaaccaagcgaaaacaacgagtaaagagtgcaattcccacagctgctcttgtcggctataccaatgctggtaaatccacgattatgaatggcctcgtaagaaaatatggagctgctgaagaaaaaactgtttttgaaaagaatatgttatttgccacccttgatacaagtgtccggcaactaacacttccagatcaaaaacgcttcttactcagtgacacggtcggttttgtcagcaagttgcctactcaccttgttgaatcatttaaatcaacacttgcagaagccgctaatgctgacttactaatccaagttattgattattctgatccacattacaaggaaatgatggaaacaactaacgagactttaaaacagattggaattaatgatattccaatgatcaatgtgtttaataaagcagataaaactgaaatagaatttcctatcctcgaaggtgacgatcaagttgtaatttcagctaaacaagatgcttcattagatcttctcgttgacgttattaagaagcatctctttaaagactatgttactaccacgcttttaattccatttactgatgggcacgtcgtttcttacctcaatgaacacactaatattttagatactacttatgaaagtgatgggacattattaacggtagaaatgtcagttcaagattatcaacggtttggaaagtatgaaaagaactaacataaaaagcagcgatcaatttttggccgctgctttttatgttagtctatctctctgcttttactccgaaaatcaaggagacaatcattactaagattactgctccaataatagatggaataattgccattcctgctacttgtggtccccatgcacctaacactgcttcaccgattgacgagccaaccagtccagctacgatattactgataactcccatcgatccaccgcgacgggttaatgcaccagcagcaagaccgatcaatccaccaacaattaaaacccaaatccaatgcataattatccctcctttttatcttccaatgtctctttaagatcagttgccttatccttagcttttcctttagctttctgcaactttccctcagtttcgcgggtcttgtagttggttattttaccttcaacctcttttaatttacccactactttatctttaattccatgtttatcgctagccaatatcatcagtcctttcatctattcttggctactagtggctgacaacattttattaatttcgctcccttctataatgactagtgctttcaacagttttaagtttaacagtctcccaacaagaaagcgatatcttaataggttacttaagttttctttaataattttatttatgtcttaattaaaaagaaactctaccttcataaattggtagagtttctttttattcttgaacttaattacattcttatttcatttcgtgaatgtttgccttctaaaatcgtaacagcatcattcaaactaatctcgaccatattgcgaatagatgtttcggttaggaacgcaacgtggggtgtaacaagaacatttggcattgccgctaatttcttgtaatcatctggaatttgatctggtgtaacttgcttcccaaagaaagaagtttcgtcagctaatgtatctaggccagcacccgcaatttctttattttccaatgctgaaattaagtccgcggtatttaccagttttccacgagccatgttaatcaagtaagcattgtctttcatcatcttaaattgtggtgctgcaatcatgttttcggtacttggtaacaacggtgtatgcaatgataaaatatccgcattcttaacaacagtatcgaaatcggtatattcaacgtatggttcatattcgacattatacgatgggtcatacgcaagaacttttgcgcctaatgctttataaatctgagcagtggccccaccaatattaccaaggccaacaattcccacggttaaattgtaaatttcattactgatcaagtcatcgctccaccgaaagtcgccatggctcatgcgttgttcgaattcaccaatccgtcgtaacaagtacatcgcctgtgtgacgcccatttctgcgattgcccgtggtgaataaatagggacattcgttacaatgatgccatttgctttacatgcatctaaatcaaaaatatcaaccccaaccattcgagcagctaattgctttattcccatggctgctaattgttcatacagttgttcatccccaagttttgttgtttgctgtaaggaaattccatcatatccctcagcaagcttaactgtattagcatttaatggttcagtaaccatcttgacatcattgtctgtcttctttgcccatgcttcaatataaggcttttcagtatcacgaacgctatacattattaatttcatcagttttcccattcctttcataaaaactgcttacattaatagcttagcactcctttacttaattatcagtatttaagcaacaaaaaagggtctgtgacttaagccaagttactttcataaaagacaaatggcgcagtacaacaatggcctccaacgcccggtaaaaccgaacgttggaggcctactgttgcttgcgggggctcccagaggctagcttcgcgtcgaaaaacgaagtcacgagtgacttctgtctcgctccctctgttatctttaattattgttcaccgttgtctccttggtttgggcgacgttgttgaaggtgcatgccgtcataatcgccttctggtccaagtagttcttggttattatccaattctgagcgaccagcatagtgatggtgttgtaaccaaatcatgccaactaataacaatgcatagaagacaattgcgattacgatcagaacagtgttacagaacatcgtgtaatgtgctcccaaaccaccagaaattgaatcacggagtcctaagattgagtaagtcatcggtaagtaccagtgaattacattatagaacttcattgtaatttccattgggaaggtaccaccagatccacctaattggagcattaagagaaccatggcgaagaatcgaccggggttatcaaagagcattgaaaggaacataacaattgccattgaagctaacccaaagcatatggttgtcgcaaagaatgcaactgggtgaataactgtaagtccacaagccatcataattgcatcttccgcgattgccattgcagttactaccagtgatccaactgttaccttacttgcccaccaagcgattggagctttaccaaattcagcaacccgacgaattgggtaaacaaagttaaatacaagtgccccaacatagattgctaatgatagaacgtatggtgctaaggcgtgaccatagtttggtacataactgtaatccgtgtgcttaagagcagttggttctgcaaacatcttggcagtccgtggtgaagtcttaataccgttgatttgctttgcaccacctgcaagcgatgtagccagttgagaagcaccagcattcaaccgcgcaattcctgaaataagagcaggagaattatcttgaagttgttgagttccggcagctaattggtttacaccagcaataagagcaggaacttgaccgtttagttgaccaagcgcaccagctaattgagctgcaccagaattcaaggccccgctattagcgttaagctgggcaattccgttacccaattggccaactccggctgtatattgaccgattccgctagccaattgaccagctccggctccagcttgggcgaccccagctgtgtattgaccgattccgctagctagttgattagcaccggctccagcttgagcaaccccagctgtatattgaccaattcctgaattaagcgtaccagcaccggcagcagcactatcaacaccattagtgtattggtttacaccactattaagcgtgcttgctccagaagaaatccgacttgttgcttgtttaagttgatcaacagctcctggcattgccgctagggtacctttatagccatttaaggttgctaataatgagttagcttgacgaatagtcccatctgcattatctaacacagcagacatttgtgagagctgacctaattgttgctgcataccactcaagcttccttgaagattgtttaattgaccaagagttccacttaatccttgaatagcagcaacgttagcactagcattttgtacaatttgttgagcggccttcttagattgatcactagctttatcatcactaagaatttgttgtgctaatccagcaatttgaccatcgttaattgcaatacctttaagcttgtcaccagcaccggcagcaccagataatgctcccgaagcttgttgaagactagcagcactactttgaacaccagcaagagcattcttggcagttgccaaaccggtctggagttgacctagtccttgctgaagattttgtgcttgatccatggcccccataatcccgttaaagttaatgtttcctaattgactgttaacggttgaattcaactgattagcaccggatgctagttgaccagaaccgttccttaagttctctgaattaccacttaacgtattcaaaccactgcttaattggttagcaccggagctcaatgtacccgagttagccattaaagtatttaacccagcattcaactgactagcaccaaaatttaacgcaccagagttagccattaaagtgcttaagccactgctcaactggttggcaccggaatttagtgcaccggaattagccattaattgaccaacaccattgccgaggagactaaccccaccagtatattgcatgataccatttgctaaggtttggctcccggtagcaagttgttgagcaccagaagctaatggtgcaacactaacacgcaaggtttgaaccccgttatttacttgggaaactccggcaacataacgatttacaccatcacttaatgtcaccattccagtaccaatttgttgggcaccatcagcggccttgttcatccccttacctacaacatgcaattgcttaaacattaccgttgcgtaagcgttagtaacttgggcacgaattttttcatttagccgtgtcatcccagtttggacaattacctgtccaatgtagtttaaagaaccattagtttgataatgtaacttcatcgtcttgggatgtttttgtaaaacagtcgttgcattttcagagaaatccttaggaatcgtaacaacagcatagtacttacgatggctcataccatactttgcttctttagcggatacgaattcccactttaattgatgatttttcttcaattcatcaacggtctgtttcccgacatccattttccggccttggtactcaaccggaatgtccttatttaccaccgcaaccggtaagtttcgtgtacttccatacgggtcccatactgattttaagaagaaaatactatataggaaaggtatgaagcaaataaccgttactgatagaagcagtaaacggttatgaataatatgacgaaattcgcctttaatcatgctccacatttaatacttcacctcaaaatttatcctttcataattttagtttgttaatgacttggtagctgctctcgcaaaattaataacgtcctcagttggtacatcataattattgccttgccaccagtaaaaggtcccgataatagcgccactcaatacataagcaagcatctcgggattatcagacttttgcagcgccgttacaattggatcattagtctcaagattgcgccgctctagaagaacctgacttaaaatatttaaaatttcggtatacaaagagctccgtgcactattaggtgctaaatgacggataacatctttatttttatcaatgtatgataataattgcttaataatgtcatcttcagaatctgtattctccgtcaatttattaatttgtgcatttaacgtttgctctaagagatcgtacttatcactaaaatagcgataaaaactgctccggtgcatcaatgcttctttacaaatttgatcaaccgtcaaactttcaaaagaatttttctctaataacgttatcaatgcattttcaaagtcacgaatagttctcgtaacacgcataactcttccctccccaaataatacaaatttaacatgattattctaacttgttgcaattcagtacaacaggggtaattaaagataattatttcatagcgagacaaaaatgaccatttgtccgtaaaaagacttttgtttgtatcttaatcaaacgaaaacaataatatgctcctaaatttaaatggtcaagcacggcagtaataactttatcgctcttttatagtaaaacgtattaaataattattaacttgctaaatctcttttctaaaatacggtataataaaagtattaaagctatgcgattggaggcttcataatggcaaaaactaaaaaacatttaactaaatccaaagataaagtatttcttggtgtctttgggggtatcgctgactactttggtcttgacgaaaccctcgttcggataatcggaattctcattttcgtctttactggctttttcccgctaggagtcttctacctcttagctgccctcgtaatgcctgaatataatggcaataagacaaacaatgatgacaatatcgtcgacggtgaattcagagaaaaataatgttgattgcagcaaaaaagggactgtgacataagttaagttactttcataaaaagcaaatacgcagtacaacaatggcctccaacgtccggcaaaaaagccgaacattggaggcctattgttgcttgcgggggctcccaaaggctagcttcgcgtcgaaaaacgaagtcacaagtgacttctgtctcgcttcctgaactaatcttaggttgttttttaagcattatttcgttgtttataagctacttgaacttgtagtccataatcttcttccgttaaaattgttgagccgcttcgcccagcaatcttattcgggcccccagtaacaactactgttgcaagatacaattgatacttatcatgagcagtatggacatcggttaggccgattttggtaatatgaccaactgggcgccgttccatttggttcatcccgatgtagatttcaagacggtgttgcaactcatcatgaactaattcaaagtatggcggaacagattgtgaattcaaagccgtaactggtttttcagttgcttgatactgttcaacgatttctttttcacttagaccatcatagccgttaacaaacacaccttccattaatagttggtcaacaacacggtgtaagttatgttgttcatgttcgtcaattgctactgctgctgggatcgtgtcggcattagcaaacaagccatttgaccggtttgccaattctgccgctagtcgttgttgtgcatcaagaggcgtcttagctttgccgtcctcaaatttttgaccagtaatctttgcgacacgcggtgaaataaaatcaaatcgtgaagtcttttcaagaaagtaaaagacgaaattaagatagataaaatatgttaatccaatcactgctaagcaatataacaatgcccgtagccaaacatgattcataaagagtcggaacgtaacataaactaaataaatatcgcccagaaaagcaataatgatataaatacgactctttaactttacgtcaaggttaaagtaactcaatgacgagttaatcatatcaagaaaactaaacattaataacccgcctccttattattcagtcgtagtcgttccggtagtattaccaccagtcgtgtcttgtgtcgttgtattattgttagttgttgtaccagtcgattgtgaggtactgtttcgattagcactcgtactttcgtttgtatttgctgatcgatttgtcgatgcttctgtgccagtgtttcctgctgaccgtgtaggttgattagtatccccagtatcgtccgttgtattgttgctattacttgtccgggtagttgatgaattacttgcactctcatcattatcatcacgatcgctttgtgaattccgacttgattgattgctttcctcatcacccgattgctgaaattggcgacttgttgatactgatgttacttttgcaccctcagaagtatgcgttgctttattaactactacattggtggcacccaacgcaagtaccaatgatacaagtgcaaatggggttactaatggcggtatctttgctcccatgtctcattctccttttccagagtatataatacacgaaaactggcccaataaatatgaatttattgtaaagattttttctggcattgggcacatatcccgtgcaattcaaaccgatgcccagtgattttaactcctggcaactgtttctcaaagaatttcttatcaattggtggcatttgaatttcttgaactcgtccacaaatatcacaaataaagtgatggtgatgagtaaaatcacacgaatatttaacctgcatctgatcatgatgttgacgcaattcgacaatgcccaatttctcaaattctttaaaattccgataaatagtatcgtgacttaatccagggaattgttctcgaagatattggtcaatttctacaatattaaagtaacgatcagggtgtcgcgcaactgattcaatcatcattttacgttgcttagtccaccgcaaatgatggtctttaataatggcctgtgcttgatcaattaatttctccaatcttttttcctcccgattaaagatgatattgtatcatattttaattctttttggataatatctgcctaacaattatatctatttgttgtttagtatttttccattgatcattaactacaacatgagcgatcccttttaaagccgctggtaaagcaagatcacggtgatactctttgctatgtaaacgagaacgaatcgcactcaatttatcgccccgcagtgtcattctcttagctaaagaagccatatgggtaacggtcaagaaaataatcactgcttgagcatcaagttgttgatggtaagtaatcgcaccagctgtgtcaagaacaatcacatcattttccccttgtttccatccttcttctaaaccttctaatgaagaaccatattgaaactggtcataagttacttgctcaagtaaatggagttttttcagggaagtcggtgtttcaaaatgatagtctaccccatcttgttcccctgaacgtggtcgccgcgtcgtatgggtgattacccggtgcatatcataatgattttgaagatagttagcgatagttgttttacctgagccagctgctcctgtcacaataaacacatacttattatttttcataattgcttattttaaatgatcgttaacttgatccaataattcttttaaattctcgtaggttaaccgttcacgagcatcttgatagttgaaccatccacaattcttaatctcttctgcttgcagatgaatgtcttccttgttatctaactcggcagtataaagggtcatttgcttatgattgccatttggtaagtcgtattcggtatacaccttaaaacttgtatcaattggtaattctaattgcgtttcttcctttatttcacgaattgctgtttcttctagtgattcattgccttcaacgtgacctttcgggaatccccagaagtgtcccttattttgactctctaagagtaaatactcaattccattttcaccttgacgatatacaactgcgccactagtaacttcaattgccatttttatccctcttttgtaattaaatttttctaatttacttttaatattaactacggtatcattattaattataaacgtggcgaaccatttcggcacgtacaatttattatagcaaaggtgggttaaagatgagcttaaacattatgcgaaaagaaagtcttgatcgatatcttggtgaagacaagcttttcgttaaatcaatgaatgctcgtgatctcatggcaattgggatcggtactgttattggtactgggattttcattctccctggaacaattgccgcaaattcagctggaccaggagtgtcattgtcatttctgttttcagcgattgtctgtgcgctagctgcaatgtgttatgccgagtttgcttctgcattaccggttgctgggagtgcctactcatacggaaatgtagtgtttggtgaattccttggctggttgctgggctgggcgttggttcttgaatacatgttagctgttgcgtctgtttcaacaggttgggcagcctacttcaatacattgcttgaaggatttggtattcatctccctaaagcactctcaggtccatttgatccagctcatggtacctacataaatatcgtggcggtcgtaattgttcttttgattacagtaatgcttgcacgggggatgcaatcctcattgcgtatcaataacattgctgttttccttaaaattgcaattatcttgatctttattattgttggtttcttcttcattaagcccaaaaattaccatcctttccttccataccacatgaagggtgtgattcacggggcaacgatcggtttctttgcttaccttggtttcgactgtgtttccagttcggctgccgaagttaagaatcctaaacgaaatatgcctctaggaattattgggacacttgctgttgcaacaatcttatatactggtgttgccgtagtcctaactgggatggttaagtacaccaaacttgacgttgccaatccagtggcgttcgccttacagatggttcatcaagactggttggcagaattattgtcaattggggctttgatcggaatgttcacaatgatggtttcaatgatctattctagttctcgtttgatctatgcaattggtcgtgacggtctgcttccttcattcttaggaaagcttgataaaaagagccactcgccacaagttgcattatggatcgtggcgattattatcgctatcatgggcggacttgtttcccttgatcaacttacaagtttagttaacatcggaaccttgtttgctttcatgctcgtttcatttgggattattccgcttcgtaagcgaaaggatatcggtaatcgtggaggctttaaggtgcctctctaccctgtgcttccaattctttctggtctcgcctgccttggcatgatgacccagttgcaaaaagaaacatatattggagcagcaatttggtttggaatcggaattatcatctacttcacttacggctactggcacagtaagttagcagataagaattaatagcgtgaactactcggccataaatgaccgagcttctgggaacacgaagtagtatttaggatattacacaagtattcttgctacctaacttacagaactccgttcttttaccaaggctagttcctagccaacggcttttaatcctttttgcaagatgttaactgccgcattaacatctcggtcgtggtgaacgccacactttggacaagtccattcgcgaacttcaagtggcttcttgccactgttaaagccacaatgcgaacagatttgactggtatagtttggtttcaccaagactagttgtttgccataccaagcacacttgtattccagcatcgtccggaactgataccaactagcgttagcgatcgacttcgctaagtggtgattcttttggagattcttggctttcaaatcctcaataacaatcacgtcgtactgcttaactagagccgtcgttagcttgtggaggtaatccttgcgcttgttggcaattcgttgttgataatgggctttaacaagtcgggcgcgttgccagttctgataatcattgagtgctaacttggtatcttggtggttgtgattccattggcgaacggcaacggttgcccggtggcgccgcttgctgaatttactttgccacttcgttacttgatgttctaacaatttagcgttgaaggtaccgtacttgacaccatcagaactaatcgcaaggtcggccaggcctacgtcaagcccgaccatttgccccgttttcggtaaccgttcaacggttgtttcaacttgcagggagaggtagtaacgacccgtcgggtcataactgaccgtataacgcttaattttggcctcaccaataagagtcgttttactcgtgcgtatacttccgagttttggtaattgtaaccgccgcttggcaagtaccttgcacgttgatcggccagtgtaggcctgataggccacatggcggctcttaaagcggggatagccaccttggtgcttaaacaatcgtttaaaggcctcggtaagattatggttcaccactaggaaactggtggaatcactttccttgagaaagggatattcacgcttgagctgtttcaagaggtagttcataccatactcattgacgaagtggctactgggattgttttggtaacgctccttagccatactgagcatttggttccaaacgaagcggtcattaccaaacatttgccataactgatcccgttgggattggttagggtacaagcgaagtttgatccctttaatgaccttgttcattctagttccacctcctttttccgttgatcatcaatgtacttggcaacggcttgttcattaacggccccaatactttcaacatagtaactgggcgaccacaagtgacggccctcctttttccaatagcttcgctgtaattccggacattcccgaaatagctgataggcagtaccgcctttcagccaacgaacaatattcgtcaccgataatttgggtggtgcactcactaacaagtgcacatggtcgtccttcccaatttccatgtgggcaatttcaaagccatatttagcggcgatctcatggataatccgtttgaaggcgatctcgacccgaccggtaaggactttgtttcggtatttggttccccaaataatgtggtaattaaggttgtagaccgatgttcggccatatgtaagtctgtttgtatctttcataccaacgattataccataattcacgtttcccatatacgcccgtcgggcgtaaaaaaggggggcaattcatcacgtccttaaaagaacgtgtttccttgccccttttcaaaaaatttaagagttacgtagagagtgagaaaattatttttccactccctttttatttaagatagtaatttgcattaaataccattttttgttaaggtagtattacttacttttttattcacaaggaggaatcaattagttaggccaaattttgatcacatacgcctaattttttatggaatatacaaagaagaattacaaaaaagcacctttatcatcaattcattttcgaatatattttgccttggctcttggacaaattgcttgtggttttgctcttggaattagtggaactgccctttcccaagcaaccgattatatcaatattaccgacttttgggttggcctaattggtgctgggagtttaattggactcgctgggagtgctttaatgggtaaaatcgctgaccaatttggccggcgaagaatgttgatgctcgatatgtatcttttttctatattttctcttttacaattagtaacaatgaatcttattatcctgtttatcttacggattttaattggtttaatgattgccattgactatactgttgggaatgctctattggtagaatggttaccagcaaaagaaagcggacgcctacaaagccaactaatcatttattggacaattggctttattacttcatatattgctggaattttagtaacagggtttggtgttcataattggcaagttatccttgcatcaagtgtcgttccgggactgatggctgcaatctatcggtcaatcttccgaattcctgcatctccgagctggttagcaagtcaaggtaagaataaaactgctcaaaaactaattcaaaaacaccttggaaaaaaatggggattatcattaaaacaaattcgtagtaaaaagccaaaagctgtctctcttaaaaccctctttaatcccccttatcgccgaaaaaccattgttggtggtttattctatgcttgtcaggcattttcatttttcggtatcagtatcttcttaccaattctcctaaaaagtatgaatcttggtaataacaacctctctgggattatctataatagttgcgtccttatcggtgtaattttcggtagtttaatcttcaagattcttagtaggcggatgtttttggtaagaacatttttcctttcagcagcagccctcattttattaataattggcaataacttttcacctttcttccaaattagcgtttttgcgatctttgcgatagtcttatcctcaggacttgtccttgattatccatatccaacagaactatttgatgttaaggttcgagctagtggggttggtacttgtatcactatcagtcgttttggagctgctagcggaacattcttattaccaatcttaactcatctcggcggtccaattttagcaatgctaatttgtactcttgttttacttataggtggtactatctgtcttttatgggcacctgaaacttcaccaaaatatatttaacattaataatagaatggtcgggaaaattttaaatttttcactgaccatttttagttttaaacatcaatccaatagactaatcaatttttaacaattgaactactcccacttagctaaacctacggtttaatgcttgaagtgggagattctggaaacatcgcatacttaccctaccgattctgaacgaaccttcaagcagaggttacgactattagccaaggctcgtcccgagcctaactttatctatcggatagctaatcctttttgcaagatgacttgtgcagcgttaatatcacgatctaaatgtttaccgcagtttggacaatcccactcacgtaccgctaaccattccgatttattcaatcctaaccgatgattattcttcccacaattagcacaaatttggctagtatatgacggattgacctgaataagctttttaccgtaccagtcacacttatattgcaacatatctactaattttgaccagctagcgttagcgattgctctagctaaatggtgattcttcatcattcccttagtattaagtttttccaacacaatgatgtcgtactttttgaccaatttagtagtgaatttttgtagctgatccaaccgttggttggcaatcttttgccgatacttcgccaccataatacgagctttctgataattcttaaaatcatctaattgccgtggaactaacactttattatgatgatcccaggcgatttcctgctgagcctttaagaaccgacgactacgtaatttctcccaacgatacaactttttatggtatttgtcttcaaaatgattgatcggttccttgcatccatctgaaagattaagtaatgacttaagtcctaaatcgccaccaatatatttacttgttttaggaagagtttggttttcactttccactaaaacagtaatgtaatattgaccagcaacgttcagacgaacagtgacattcttaattttacccattggcaatcgaccagctctaaaatagacgataccgagttttggtaactttatatgatggcaatctaaaactttaatattgccattaacgtactttgaattgtagctctgagaatattttctggatttaaatcgagggaacttattttgacctttaaaaaagcgttgaaaagcatcggctaaattgcgattagcactttgcaaagcagttgattctgcttgtttcaaccaaggatactcaaccttaagttgtttcaacagattattcatcccaaaggcattcacaaatttagcttccggattattcttgcgccgttcaatttgcatattaagcatttgattccatacaaaacgaacacaaccgaaggtttgccagagctgattttgttgtgctgaatttggatagatgcgcattttaacggcttttagaaccattattttctcccttgactttcaatatatcgttttacaacttctaaaggcgctccaccagtgctaattaagcaatagctttgtgtccaaaaggctgatttccaaagatattgcttgatttctggaaattgttttttgaccattctggagctagacgatttgtaagcatttaaaaatttagccatttccgtatgaggcgttgctctaaacaaaacatgtacgtggtcctgatcataattccattcttgcaaattaatgccgtacgcttgtcccacaactacaaaacgatgtttaagatattcagatatttcatcgttaattacttttcgacgatacttaaccaccattaccaaatggtaattaagcaagtatactgaatgctgatttctatctaattctattgttatcaccacattttatagatatatactaaatatatcatagaataaaagaaaaagcactaacgtactttaagagagcgattcatcccctacttatagaagtgggggatgaatcgcaaatttatggataaaataatttgattacaaagcgaaccaaatacggatagtttttgattaatactgctatatttatcgggaacttgttttcgtgcccactcctaataagatggcacaaaagactgttatagcggttccaagcaaatataggcggtatacgttaagaataagccaagagtaagacagataagggtagtcttatagcgagtagttaatggaatcttttgcaatttaggactcaatgcgcctactaacattcccgaaagcatcaattcgataaaaacaatgaaaatccaataagctttattctgttgaaaagcaaatagtaaagtatagataatgacataattcttgatcgctccgagccaaatacgaaatagtttaaaaggttgttccagaatatttcgtagttcaaggataatcccaataattgctagcacgattagggcctagccaaaatcagaaatttgacccgtcttcttaaagaaactaataataaaaaccacggtaagcacagcgatggcaggaaaagccgtttttaaattaaaagagaattttaaatccaatggtgtcttatctcgtttaacaacaacgtaagcgtaaataacttccaagcccaggaaaaaagtataaaaaacaaaaccgacaactaacggcagcttcatcagtaaaatcccgagggcgatcagtccgataattacactaaagcccgcgataacatttactcgcttcaaatcaatcccggaaatttccttattgggatcgccgagcaattttaatcctgtcacgccaaaaccgatcaagatcgccgccaatctagcaagccactcaaagcgaaaataaattccaatagaagcaaggactcccccaataaaagcaataactgaacaaaacttagtaacacctgaccaagaagctaaatttaggcgcccatcgagaataaaaggcattactttttcaacggtgtaaacaaaaatgaacggccaaacaaatgtgattatatttgcatgggcaatgatagagaatgcaaatagtaacgttggaaatagaatatagcttcgagctacaaattcatggttaattgctaaaatcttcttcataagcagcctccgatcactttaccttttatttttagtaaaccacatccccttataaaagaaaaataataggactcctaacatgatttttaatgctagaagtcctagtagctttttatttagcaaacatcttaaattctaaaaataaatcattgtattcacctaaaacgcgtaatggcaaatcacgatatacttgcaaatgcttcatcgttgtttcaggaggatagaaagctttatcatcggtaattttcttgggtaattcttttttagccgctttatttggtgttgcgtatccaacgtattgagcattttgagccgcattttggggatctaacataaagttaataaattcgtaagccgcctttttattacgtgctgctttaggaatcaccatgttatcaaaccatatattgcttccttcgcttggcacaacatagtgaaggtgcggattaatattcatcatttcgcgcgcgtcaccagaataggtcacacccacggctgcttcattttgctccatgtacatcttcatctcatcagcaataatcgcttttacattgggcgtcaactgctttaaatgggcctgcgcaagcttcaattgatggtagttagtcgtattaacagaatgatgctgggtaataagggcaaccgcaaacacatcccgcgcactatcaatcagcatgacattattctttaagcgcggattccaaagttgttcccaatgctggacgtctttgccatttactttttgatcattatagataatacctaacgttccccaaaagtatggtacagaataacgattgtcggggtcaaaagaacgatttaaaaattgcggatcaatatacttaaggttaggtaatttctgatggttaagaggtgcaattaaatgctcctttttcatccgttgaacagtgtattcactcggcacaacaacatcataattagtcccgccttgccgaatcttggttaacattgattcgttgctatcaaaggtttcataatctacatgatagccagtttgatgttcaaatttcgttatcaatgctggatcaatataatctccccaattgtaaattgtcagagtttgttttccaccaccagttttttgctggttgaaagcaacatccccaagcgctagcaaaatacaaataacgataattgcaaggaatgcagtaaatatctttttcattgtgcatccccctctttaacagccacaatccgtgtccgtcgaccgccccgtttactaataaggtaatagccaattactaacagaagcgaaacaataaacatcaacgtagagagggcattgatttcaaggttaattccttgccgcgcccgcgaatatatttccaccgataatgtcgagaagccatttccagtaacaaagaaggtcacagcaaagtcatcaagtgaatacgtaaaagccataaaatagcccgcaaaaatacccggggcaattgacggcagtactacccgagaaagaacttgccagcgactggcccctaaatcataggcagcatctactaatgttggggacatttcatttaattttggcaacaccattaaaacaacaattggaatacaaaaggcaatatggcttaagaggactgagacaaagcctagtcttacccccagcatggtgaaaaagattaaaaagcttgccccaataattacatcgggcgagaccattaaaacattattcaaagataacaaactattcttccacgggcgccgtgcatccttaattgccaaggctcctaatgttccgataatcgttgctaatagtgacgccaaaaatgctactaacaaggtattaataacaatggtaatcattcgcgtatccgcaagcaaatccgcatagtgttgccaagaaaagccatggtatttttccattgtttgtccgctgctaaaggaaaaaacaactagatacaaaattggcgcatataagatcacaaaaactaatgccaggtacgcttttccccatgaccatcgctgctttttcattaatggcgtcctcctttctgtttcttatcaccagtcataaacataataataaacattgcgataatcagcacgaccccaatcgttgaacccattccccaattttgcgttgtgaggaaatgttcttcaatcgcagtccctaaagtaattacacgatttccaccaatcaaacgggtaatcataaagagggagagcgatgggatgaagaccgcttgaattccagcttttacgcccggcatagaaaggggccaaatcactcgacgaaaggtttgccaatgagtagcacccaagtcatagctagcatttattagtgacgggtttatttcagccaggttattgaaaatcggcaacaccataaacgggatttcaatataagcagccacaaacataaaactggcatccgtgaacaaaagctgatgactcccaaggcccataaactggaggaaaccgttaattgtccctgttcgactaaacaagccaataaacgcataagtcttcaataataagttgatccatgttggcaaaatcaccagcaatagccaaaactgcttattaggcaatctattcaaaacataagctgtcggataactaatcaccaatgtcacaagggtaatcaaaaaggcataccagacagagttaagcgtcatcttaagataaacacccgatgtcaggtattcagcatagttattaagggtcagctgaccattgatattaaaaaatgattgataaaagatcaataccaatggcgcaatcacaaataggataatccacaatgcatatgggacgataaacatcgctttttgccgcattagtctccctcctcgtagctatcaaggcgagcatcaaaatcttcttcgctttcgttataccgcataacgtgaatatcttcgggatcaaatgtaatccctactttagcccctacctttgttttatgaatagaattaatcttccacttatggttacgttggtcaatcaccgtaatttgataatcaacgccacggaaaagctgcgtttcaacagtgccgactaattttcctttctcaaccgtcgtaatgtcaagatcttctggtcggatgacaacttcaaccttttcgtttggtttcatccccgcgtcgacacaatcaaagtcttgaccattgattgaaactacatagtcttttttcataatgcctgggacaatattgctttcaccgataaaatcagctacaaaatggttaagcggttcatcataaatatccacgggcgtcccactctgctgaatcttaccatcattaataatcataatctggtcactcatggctaatgcctcttcttggtcatgggtaacaaagataaatgtaatccctagccgccgttgcaattgccgcaattcagtctgcatttgaactcgtaacttatggtccaacgcagacaaggcttcatccaacaatagtactttcggcttattaactattgcccgggcaatggcaactcgctgtctttgcccaccagacatcgcggtaatttcccgatcatcatagccatctaattgaaccaggtgcaaagcttcttttacgcgttgtttaatttctgattttttgacacccttaatttgtaatccaaaggcaacgttttctgccacattcatatgagggaaaagggcgtaatcttgaaagacggtattgacttgccgttgattggctggaatatcattgatttgctttccatcaaaataaatttttccactactaggatgatcaaaaccagcaattaagcgcaaaatcgttgtctttcctgatcccgatggtcctaataaggtatagaatttaccggcctcaatttcaaagcttatatcacgcaacacaacgttatcatcatactgtttgcttacatgctgaaattccattatgttttttaccatcagcgtttccccaatcatcattttttaaactaagtcttagtataaagtatacgccttaaatcgcaacactgtttatcctaagcaaattattttgaactactcccacttagctaaacctacggtttaatgcttgaagtgggagattctggaaacatcgcatacttaccctactgattctgaacgaaccttcaagcagaggttacgactattagccaaggctcgtcccgagcctaactttatctatcggatagctaatcctttttgcaagatgacttgtgcagcgttaatatcacgatctaaatgtttaccacagtttggacaatcccactcacgtaccgctaaccattccgatttattcaatcctaaccgatgattattcttcccacaattagcacaaatttggctagtatatgacggattgacctgaataagttttttaccgtaccagtcacacttatattgcaacatatctactaattttgaccagctagcgttagcgattgctctagctaaatggtgattcttcatcattcccttagtattaagtttttccaacacaatgatgtcgtactttttgaccaatttagtagtgaatttttgtagctgatccaaccgttggttggcaatcttttgccgatacttcgccaccataatacgagctttctgataattcttaaaatcgtctaattgccgtggaactaacactttattatgatgatcccaggcgatttcctgctgggcctttaagaaccgacgactacgcaatttctcccaacgatacaactttttacggtatttgtcttcaaaatgattgatcggttccttgcatccatctgaaagattaagtaatgacttaagtcctaaatcgccaccaatatatttacttgttttaggaagagtttggttttcgctttccactaaaacagtaatgtaatattgaccagcaacgttcagacgaacagtgacattcttaattttacccattggcaatcgaccagctctaaaatagacgataccgagctttggtaactttatatgatggcaatctaaaactttaatattgccattaacgtactttgaattgtagctctgagaatattttctggatttaaatcgagggaacttattttgacctttaaaaaagcgttgaaaagcatcggctaaattgcgattagcactttgcaaagcagttgattctgcttgcttcaaccaaggatactcaaccttaagttgtttcaacagattattcatcccaaaggcattcacaaatttagcttccggattattcttgcgccgttcaatttgcatattaagcatttgattccatacaaaacgaacacaaccgaaggtttgccagagatgatttcgttgtgctgaatttggatagatgcgcattttaacggcttttagaaccattattttctcccttgactttcaatatatcgttttacaacttctaaaggcgctccaccagtgctaattaagcaatagctttgtgtccaaaaggctgatttccaaagatattgcttgatttctgggaattgttttttgaccattctggagctagacgatttgtaagcatttaaaaatttagccatttccgtatgaggcgttgctctaaacaaaacatgtacgtggtcctgatcatgattccattcttgcaaattaatgccgtatgcttgtcccacaactacaaaacgatgtttaagatattcagatatttcatcgttaattacttttcgacgatacttaaccaccattaccaaatggtaattaagtaagtatactgaatgctgattcctatctaattctattgttatcaccacattttatagatatatactaaatatatcatagaacaaaagaaaaagcactaacgtactttaaaagagcgattcatcccctacttatagaagtgggggtattctcgcaaatttatggataaaagtgcgataattaatatatcaaattttatacgaggtgttccagatgaaaatcaatcaatttagtattacttcgactacaccacaggcacggcgccaagaattaatgcagattcacttgcttcggaaaaacgaagaacaaaatttaacaccgaacgcaatgtttgaaatcttcttagcacgaattcatatggcaagtgcccagccgatcatcactaaacagtggcttcatgacctattagctactcctgaccttgctcttgatgattggtttgaccagaatcaaatattaaccgatgaagtattttacctcgtcgctctccaactactcgattttgaggccgcagttgattttgatattacagatccccttgctacagttaagaaaattggcttgccagtcgaatcacatcaaaaatggacaaccgcaaacgttaccgatgctttttaccttcttttaaatactcataacaaaaatggtcaatcgcttattgatcatttaacggcagagggctttatggcttggagttaccagcttccagctgaacaaaaaccactctttttcaatggaaagccacttgctagttttgaccctgctaaattcattcgtgaggttgtttacattgagaccgatatggatactgattttgatggtaaagcagatttagttaaagcggaaattatgcggccaatcgaatcggaccatggactaaaagttcccgttgtctttactgctagtccttataatcaaggaacaaacgatgaatggggcgaaaaagcaacgcataacgtcaatcttcctttgaaacataaggatcctgattatcaggccccgactgaagaaaaatttccgactgacttttcacgccaaaaagttactggcgaaagccggcaagctactgagacatttagtaccacgccagcctacacactaaataattacctcgccgcccgtggttatgcggttgtttattcagccggaattggtaccaaagattcggatggtctgcaaacgtgtggttcttcagaacagactgatgcgatgaaggctgtcatcgagtggcttcatggtgatcggcaagcctttactgaccgtcatagcggtaccacaatcaaggcgacctggtgtaatggtaaagtcgcaatgacaggacgctcatatctcggcactctagccaccgctgtcgcaaccactggtgtacctggcctcgaagcaattattagtgaagcggccatttccagttggtatgactattaccgggaaaacggccttgtccgggcacccggtggctttcaaggggaggacgcagatgttttagctgacgaaacattcagtcgaaccaaacgtccagcagactaccgccgaattgaaaaagtaaatgataaatatattgctaaaatgcaaggagcaatggatcggacgtctggtaattataacgagttctgggaccaccgcaattatcggcatgatctcgaaaacatcaaagctgccgtgatgatggtgcatggccttaatgataccaatgtccgtcctagtaacgttaaagcactttatgacggcactcaaagtttgccgattacaagcaaactcatccttcaccaaggacaacatatttatatcaatgcctttcgttcattagatttctctgacatggttaatctctggcttgctaataagctctgggggcaagaaaatcatgctgatgataccctgccaagtgttcttgtgcaagacaatagcacccccgaaacttggaccgcatatgatcaatggactgcaggcgaacaaaaacagtaccaatttaacgaccatcgcctaacgaatttgcccggactaggaatccaaagctttaatgaccaacaaccagaagaaaagtaccttcaatggtgtaaacaaccccaagcatgggcaaaggcactcgtgaatgataacggtcaatttagtcggcgcttcgtaactgctgtatttaataatgatacgcttctccgtggaactccgactgtcacattaaaagtagcttcttcgaaaaattatggaatgattagtgcccggcttgttgacctgggcagcagcaaacgccttacaatgtcgcctgttttgtttaatcgtaatggtcttgagctaggttatcactggaagacagatgaccttcgtgaatttaaattagcaaaagaaataactaattataaggtaatcgcaagtggacatattaatttgcaaaatcgaaacaatccagcacagattgacgaattagccgctaatcaatttgtcaccgttaagtttgatcttcaaccaattttccaccgaattgtagctggccatcaattagggatcattatttatagcactgattacgaatacacgcttcgtggcaacgaacggattgaatatcaattagagctgaatggctgtcatcttgacattcctggcttcagcgttttagcttaaaaagacagcgcgttaaaactagttttagcagaattcagctaattgcggtagaatagttagtattaccaataaaaaggagagattcgagaatgaaacaaggcactaaaattattacccttgataacggctatcatctgtggacgaatacccaaggtgaaggtgatattcatttattagctttgcatggggggcctggtggcaatcatgaatactgggaagacgctgctgaacaattaaagaaacaaggtcttaacgttcaagtaacaatgtatgatcaattaggttcactatattctgatcaaccagatttttctgaccctgagattgcgaagaagtaccttacttacgaatatttccttgatgaagtagatgaagtacgaaaaaagcttggcttagacaatttctatcttattggtcaaagttggggtggccttttagttcaagaatacgctgttaagtatggccaacatcttaagggcgcaattatttcttcaatggttgacgaaattgatgaatatgtcgaccgggttaatgaattacgggaaaagactctttctccagaagcagttgcctttatgaaagaatgcgaagccaagaacgattacagtaatcctaagtatcaagaatacgttcaagtaatgaatgaacaatacgttgaccggaagcagccatccaagctttatcatcttaaagaccttggcggcacagcggtttacaacgtcttccaaggtgataacgaatttgtgattaccggtaagcttaaagactggcatttccgtgaccaattgaagaatattaaggtgccaactttaattacatttggtgaacacgaaacgatgccaatcgaaactgctaagacaatgaatagtctcattccaaattcacagttagttactactcccgatggtggtcaccaccacatggtagataaccccgatgtttattacaagcacctcgctgacttcattcggaatgttgaaaataatacgtttaataattaataaaaagaccgaggaaacgtttctcggtctttttattaattattcatgaatcatattttaaaaatatcttaactagaactaaaatattaaatgaatatggtacgatatttatacgataaatacgaaggaatgattaaagcaaaaacttaatacggcttcactgatgttgttcgcttaaggtgtgggacctttaagcattagttactttactcaatttatatatttaaggggaaaaatgaaagaaaattatcaactaacaactgacgaaataaagaaagaataccaattaactgattttactcacggcctatcaacccaagctgtcgaaaaacggcttgccgatgaaggacgtaatatcattgaagtaaaaccaacacccaagtggaaactattcttacgccagtttaacaatattgttatctacattttattagccgctactttactgaccgttttaattggtcactatactgatgcgattgttatcggggcggttgtcattctaaacgcgctcattggttatttccaagaatcaagcgcagcgaatgccctcgccaaaattaaagagatgatggcgcaacatgccaccgtctaccgggatggtaaacgacaagatattgatgccgcggatcttgtccgtggggatgttgttttcctcgaagccggtgataatgtaccagctgatttacggattgtctcagctgataacttacgaattgaagaatcggctttaaccggtgaaactaattcggttatcaaaactgatgaagcaattaccgaccaagacgttcctctcgctgatcgtgttgatatggcatatgcttcgacttcagttacaagcggaagtggcctaggagttgtagtcgcaactggtgaacaaaccgaaattggtaagatttcacaagaagttgcgcaaatcaaatcaaagaagaccccattaactaaagaaattgaccatgttggaaaggtcgtttcttacattacaattactgcttcagtgattgttttcgttgtcggtttcttcctcgaaatttactccttgcctgcccttgcgcttgcagtcgtggcaatgttggttggtgcgatcccagaaggtttgcctgcaattacctctgttatcttagcctttggtattagcaaaatggccaaagagcatcagacaattatcaaatcaatgcctgctgttgaaacattaggctcggtcgatgttattgctactgataaaacaggaactcttaccaaaaacgaaatgaccgccattgagttatgggtcggcgataaacactacacggttaccggaactggttatgctcctaatggtgagattctcttaaatggcaaaccagctcaactgacagatcagctcaaacttttcttagaggctggataccaagcaaatgatacggctttaactgatgaagacggcacctggcatattaatggtgaaccaactgatggagccttcttaactctttatcacaaagcgtttggggctaaatatcaatcgccatataaagctgttgacctccttccatttgattctgattaccgttacatcgctgaattaactcgtgatccagaagataaacaacaagtaatctttgttaaaggatctccagacaagctctttgaaatggccgcaaaggaagatccacaatttgatactgccaagtggcaacaacgggtagatgactggtccaaagccggaaaacgagttattgcggttggctatcaacctgttaatggcaaaaatctaatagaagtcgaacatgaccacctctacaggggaattcacttacttggcttagctgctcttcaagacgcaccacgcgaagaagtgattgttgcgttaaagcaaatgaaccgtgctggtgtttccattaaaatgattacgggggatgacccgcaaaccgcccgtgcaatcggtaagcaactaggcttatcgacgggcccgatcaacgcaatcacaggtgcagaatgggataaactttctgccagtgaacgagaagaggccgctttagataaccaagtctttgcgcggacgactccacaaaacaagcttgaaattattgaagcgctccaaaatcggcaaaagatcaccgcgatggttggggatggagttaacgatgcacccgccttaaagaaagccgatattgggatttcaatggggatcaagggaacggacgtcgctaaagatgctgctgacatgatcttaggaaatgataactttgcggtaatggctgctgttatcaaagaaggtcggcgaatttacgacaatatcaaaaagagtatcttattcttattaccaacctcctttgctgaaggattggtggttgccttctccattcttactggtcagcaagttcccctccaaccagctcagctattgtggattaacttaatcgccgcaatcactatccagtttgcgttcgtctttgaaaaagcagaaaagggcatcatggatcgcaatccgcgccctgtgacccaacgattaatgaatcgacatgatttaatccagatgggttatgtctcagccttaatggcgctgttcgccttaattggttacgaatggttcatcagtgctggggcagacgttgtcaacgctacaacaatgatggttaataccattgttattagtaaggccttctacttcttcagcattcgaactgaacgatatggactaaaagaagttggaaatattggcaagaaagcctggggcgttattggattgatgattcttttccaattgatcttcacctacgttccatttatgcaggctgccttccacgtgaccggaataagtttactggaatggctagcagtaattgtcttctcttgcttaatcttcttatgtactgaatctgataaaatgattcgtttccgtctaaatcgacggtaaaattaacgccactgaatgagatttttcatcttcttcagtggcattttttaattcataagctttcgtaatgttttgaccaaatctatgtaagcgtattccaaaatctgatataatatacctaacacatagaaaaggagtcttatcatgaaatatcaagaaaccaaagaaacacttaatcaattagttgctgatctgagtcaaatggcaatgataattcatcaaactcactggtatatgcgtggcactaactttctaaagcttcacccattaatggaccaatttatggatgaaatcaacgatcaacttgatgtaatatctgaacgattattaactctcgacggtgaaccttattcgacccttaaagaagtcgcaacccatacgaaaattaaagactggccaggaaactttgataaaacaacgccagaacggcttgcgcatttagtcgctggttatcgttatcttgaggacctttatcagcatggaattgaagtgactgacattgaaaaagattattctacccaagatatcttcattggatttaagacggcaattgaaaagaaaatctggatgctgcaagcagaattagatcaggcaccagaaattgacaactaataatgaaatcggcaccaaactaatcgagattcgaacgtttggtgccgatttattgtctaaaaattattttttctgattatctaggagtccttctttttcatcttttaatcgcaagtcatcaagccattctacatgcttttcttcataactacgatctttcttgataaagaagtatgctaccgcggcaagaatggcgatgacagttccgacaagcaaggtcttagccgtaaaattagtaaccatgtaacaagaaactaacaatgcaaaaatggggataagatatttcctgggtaatttgaaaccatgtgttggatattcgttactatgttcaaatttaatgacggcaagaattgagggaacatattgaatgaatgaagctaagactgtacaactaaccaagaagagataactctgggtagcgaataaagcagaaaggatggatgttaataaaattccgactcatggggcatcattcttattcttcttcccaataaactttggcaacatgccgtgctcattggccattgaagtaattaacgatggcgtgttaaacgaagatgaaaaggcaaccccaaagatacttacaagcatcccgaaaataataaaggcatatccccacttaccaatagtggttccgagtcctttcgcaagggcacctcccaaagcattagccagtggtgtcgagtagccgcctaatttagtcccggaaagtccaacggcaacggtcatcatcaatgcatccaaaatagttacactaaccatgactgcaattaacacccgaggaatattcttttctggattcttcatttgcttagcagcaattggtaaaaatgaaaaaccagtaaaaagataaaagatcggggtaaaggcttcaccaaaatgatgaataaatgacattggtccctttaaagctgcttggggaatcactggtgagaagttagctttatggatgaagaagaccccaacgacaataaagatgatcagcgtaaggatcttcgcagccgctgatacattattaaccagtttaacaaggccgtggccgaagaaattaataactgcaaagagcacaattaagccaaaagcagcggctccatagataagcggccgattaaagattggcaaaaagttcttgagggtagttaataaggcaacaatttccgctgaatgggtacagcagcctaagaaccaggtaaaaatccctaactcataaccggtaaatcggccaaatgcatgataagaataaagccatgctgcacctgagccggtaaaacgactagaaagatcggcataacatagggcgatcaatgaaacggttattgctgtacatagcaaaactgctacagccgataagttcatgtaccgataaataacagatggcagtaaaaatgttcctgaaccaattactccattaattcctaaaaagtaaatcgaaatgaatgatagctttttaggtactgatttttgattactgataatgaccaccccacataaaatttataattccatttatattgtagtcttttcaaataaaaaggtaatttatcagctattctaatctcaatcttttctgaaattgttatacaattaagaacgtacttatattttataaaggatgaataaaatggcacagaagattgagaattttatttttgatattgacggcactttaattgatactattgatatgtatatgccagcaatgattgatgttttagctcaacatggtcacccagttgcacccgacaaagtagagcaaactaagcatgacttatttggtattacgggacaagatgccctccgtcttgctggaattagtgaggatgaaattccggcgatccaacaagactggtttaagctggcttatcaacgtgctgatcaagtaaaagtgattgaaggaattccggaaatgcttaatacccttgccaatcgtgaagatgcaaggatcgccatcgcaacttcaaaactcgctgacgaataccaagaatacttcgttaacaaatatgactttgcaaagttatttaaggttgccattacgtctgctgatactaaaaagcataagccagctccagatcctattttagcggcaatggataaaatgggagcagatcccgccactactgtttatgttggagacacgatcaatgatatgaaagccgcccatgcagctggtgccaagtttgcaggcgccctttactcttctgcaaatcccgatagtattaaagatgcggacttcccattaatgaagcccgctgatctcttagaaatttaaaacaaataaggagtctctggtgtttagaattcaaacgttagagacttcttttaattgttattcatgtccaccttaagaattttattaataatactactttggagtctttacatgctctgcaacatattcttgagccgttttttctggcatttggtaaacattaacgagagcgaccactatttctgacggtgcagtcttttgactggctaaaaacttaactaatttttgtttcgactcttctctttcttctcgccgtgcgtccattaaatcaagctcgaacttcataaagcctcgtctcctctctggctcctgcttaatcttaataatctcgtcttgaatcttaataataaacttactcttattgtctactcgactacgcattaaagcaaggaagttcttaatcggctgctcatctttagtaaattctttagccaaggcattaaagatcacaactgtccgttggtcgcctaatttcaactgatgattacaagtacacgccatttcaaacacataacgggcccaaccatagccaaaataatcaaaatcacaaaacatgagcacataggtcggatgaagacttaaatcgcgataatccttgcccggcaagagtaatccatgatctatttgctcttgacaataccgcaagcgataaggcaaattctgtcggtcagctacctgcatctcaataacaataatgttgccatcttcatcctacacataaacatcataacggacgcgccggccagctacgacattaatatccttttgagttgttaactggacgatttgagttgcctttaaatggggtaatgcacgattaatcaattctaaacaaatttctttattctgcataaccatcccgaacattggatcactcgtaatagtcatcttttcccacttttcgagggccttttcatagttctctggcaatttcttacacatttcctcaatcctttcacttctacctcactataaagatatatacgtaaaaaattgccttttgcactaaaaatccctaagtcagtattgctaccaacttagggacttcaactatccaactgaaatatacattaattgccggccttcgtaatctacggattatcctcgccagctatctcttcattcagcagaatagccagtcagcaaatcattctgttacacaagaaataattattcattaagaaaagacttaagattaagctctcataacttaatcttaagtctttttaatagtcgtcaattatagttatcaatcaaaattaacgtctgaattttgatgaattttacttgtttattgcctttgaccacacaagagtccctttctcgttggtaaatcttatcatgtctaccaggattcatagaaatcgtcttggcaccatctcttataattaccctttggggaccatttactattgcatccctttttctaacttgaactactcccacttagctaaacctacggtttaattgcttgaagtgggagattctggaaacatcgcatacttaccctaccgattctgaacgaaccttcaagcagaggttacgactattagccaaggctcgtcccgagcctaactttatctatcggatagctaatcctttttgcaagatgacttgtgcagcgttaatatcacgatctaaatgtttaccacagtttggacaatcccactcacgtaccgctaaccattccgatttattcaatcctaaccgatgattattcttcccacaattagcacaaatttggctagtatatgacggattgacctgaataagctttttaccgtaccagtcacacttatattgcaacatatctactaattttgaccagctagcgttagcgattgctctagctaaatggtgattcttcatcattcccttagtattaagtttttccaacacaatgatgtcgtactttttgaccaatttagtagtgaatttttgtagctgatccaaccgttggttggcaatcttttgtcgatacttcgccaccataatacgagctttctgataattcttaaaatcatctaattgccgtggaactaacactttattatgatgatcccaggcgatttcctgctgagcctttaagaaccgacgactacgcaatttctcccaacgatacaactttttatggtatttgtcttcaaaatgattgatcggttccttgcatccatctgaaagattaagtaatgacttaagtcctaaatcgccaccaatatatttacttgttttaggaagagtttggttttcgctttccactaaaacagtaatgtaatattgaccagcaacgttcagacgaacagtgacattcttaattttacccattggcaatcgaccagctctaaaatagacgataccgagttttggtaactttatatgatggcaatctaaaactttaatattgccattaacgtactttgaattgtagctctgagaatattttctggatttaaatcgagggaacttattttgacctttaaaaaagcgttgaaaagcatcggctaaattgcgattagcactttgcaaagcagttgattctgcttgtttcaaccaaggatactcaaccttaagttgtttcaacagattattcatcccaaaggcattcacaaatttagcttccggattattcttgcgccgttcaatttgcatattaagcatttgattccatacaaaacgaacacaaccgaaggtttgccagagctgatttcgttgtgctgaatttggatagatgcgcattttaacggcttttagaaccattattttctcccttgactttcaatatatcgttttacaacttctaaaggcgctccaccagtgctaattaagcaatagctttgtgtccaaaaggctgatttccaaagatattgcttgatttctggaaattgttttttgaccattctggagctagacgatttgtaagcatttaaaaatttagccatttccgtatgaggcgttgttctaaacaaaacatgtacgtggtcctgatcatgattccattcttgcaaattaatgccgtatgcttgtcccacaactacaaaacgatgtttaagatattcagatatttcatcgttaattacttttcgacgatacttaaccaccattaccaaatggtaattaagtaagtatactgaatgctgatttctatctaattctattgttatcaccacattttatagatatatactaaatatatcatagaacaaaagaaaaagcactaacgcgctttaagagagcgattcatcccctacttatagaagtaggggtattctcgcaaatttatggataaagcgagtaatgtttgttttgacgatataattttttggctttctttaagcttactactttaagtggtcgggctccctacgcgtctcttccgatatatgcaatactgaaatgttggcgcaataaagtgtttgtagcgttaaaaatataataataattatagagcacttttttatctttatcgaagtatctaaattctagtgcttcagtcttatttggagtcaatgaattactggcgtttttggttcctaaataagtaaataaagcaattgaaaggccaaaagcgatgagggcgatatacccccaccgcttattatttttttctgggtgtaattttgcgtgaaactagccgatgattaccttgacttagcttcgtatgacatactgaacattctcgtgaccctaatgcattaacttttccacaattaggacagactaaggcaagcatctgtcctttaagggatttcccacaattctcacagacttcggcatcgtctggatttaatgtattacagtagggacattttttcatttagtaatccccattgaagagctgtgcattgccattcgcttatcgggatagagtttcttagctagggcggttaccgctgtcggtgcttcaccaaagccggccgcaatcaatgcgactttccccgggtaggtcacaccatccccgatcgcatataccccttcaacactggtctccatcattgaatcgactttgatcaagttgcgctctgctgctaagtcaagggaccactgatttaaggccgcattgttagaagtaaagccatagttaaccacaatcttatccacattcaattgtgcttcgtcgtcactacgcatcttcttaagatcaagcgttaccgtttcatcgtcttccaccgttaatgcgcgtggtaagaaaggcgtatctagttgtacagatgactgtttaagctgagttacagtatgctccagaccgcggaactggtcccgccgatggacaaggtggacttccttagcaacgggttcaagcatcaaggcaatatcaatcgcggagtcgcccccaccaagaatggcaacccgcttgtccgcataatcagctttatgattaacaaaatatgaaagctgcttgccttcaatctcagctgctccctctaaagcaagcttacgcggagtaaacgccccgttaccaagagcaatgattactgctcgtgaccgggatacccgctttgctgatttgatggtaaaggttccatcgtcttttttaatgacgtcctcaacagtttcaccgaggaattggtcgatcggtgccactgccatttgctcttctagcttagcaattaggtcatgtccagttacacctggcattcccgctacatcccaaacttgtttttcaggatagagtgcccctacttgtccgccaagttgtggaaggctttcaattagctgggcatctaattcatgaaggccgcaataaaatgaagcaaacatccccgctggacctccaccaataattgtcacatcgtaaattttctctgccatttctcctctgatcctttcattttcatctctagaagtattatatcatctttatttttctaaaatttagtaagcggtctcaaattttaattgtaattattcaaaatttaaattaacatattatatacagagattgattttgcttaaaattggaggaataaatactatggcaaaacgtaaaatgattcttgatttagatactggtgttgatgacgctttagctattgcctatgcgctcgctgacccagaagttgatctaatcggaattgtaagttcatatggtaacaacctattagatgtttgtgccgaaaacagccttaagttattggaattattaggtcacactgatattccagtatttaagggtcttccacattcatgcactactgaacactttgatgtaatgcaagtttcaaaggatatccacggtgataacggtatcggtgatgttgaattacctgcgccaagtcgggctcttgaagaacaatccggtgttgatttctacatcgaagccgctcacaagtatggcaaggacttaatcatcatccctactggtccaatgactaacttagctgctgctttgaagaaggatcctgaaattgctgacttgattggtaatgtcacattcatgggtggtgccttaactgttgaaggtaatgttactcctgtcgcagaagctaacattaaccaagacccaaaggctgccgatgaagtaatgaagtccaatttgccacttacgatggttggtcttgatgttactcttcgtactcttcttactaagaacgaaacaaagcaatggcgtgaattaggcactgcttccggtaaggcttttgctgatattaccgacttctacatcgacgcttactacaaccttgatattgataagcgtggttgtgccctccacgatccattagctgttggtgttggtattgacccatcatttgtttcaactattagcttattcatgaaggttgtttaccaagaaggaccttactatggtcggacaatcggtgacaacgctaagttaaacgatcctaaccctaatgttaaggttgccgttaacgttgacaaagaacgttacctcaaggccttcatggaccacctaaacaagcttttcaaagaaaattaaagtaagtgggaattaacctcctcgacaaggcggtgggctaaggatagaacggtgattagcacggcacaggctgattatcgttcggacttagacttgagtcttgtggttaatttccacgatatcttaacaaatattcgcattaagaggctgttgaaaataattctccagtctcttttcattttacaaggcgttattctcctgtttttcttcgatagttgttatattgaactactcccacttagctaaacctacggtttaatgcttgaagtgggagattctggaaacatcgcatacttaccctaccgattctgaacgaaccttcaagcagaggttacgactattagccaaggctcgtcccgagcctaactttatctatcggatagctaatcctttttgcaagatgacttgtgcagcgttaatatcacgatctaaatgtttaccacagtttggacaatcccactcacgtaccgctaaccattccgatttattcaatcctaaccgatgattattcttcccacaattagcacaaatttggctagtatatgacggattgacctgaataagctttttaccgtaccagtcacacttatattgcaacatatctactaattttgaccagctagcgttagcgattgctctagctaaatggtgattcttcatcattcccttagtattaagtttttccaacacaatgatgtcgtactttttgaccaatttagtagtgaatttttgtagctgatccaaccgttggttggcaatcttttgtcgatacttcgccaccataatacgagctttctgataattcttaaaatcatctaattgtcgtggaactaacactttattatgatgatcccaggcgatttcctgctgagcctttaagaaccgacgactacgtaatttctcccaacgatacaactttttatggtatttgtcttcaaaatgattgatcggttccttgcatccatctgaaagattaagtaatgacttaagtcctaaatcgccaccaatatatttacttgttttaggaagagtttggttttcgctttccactaaaacaataatgtaatattgaccagcaacgttcagacgaacagtgacattcttaattttacccattggcaatcgaccagctctaaaatagacgataccgagttttggtaactttatatgatggcaatctaaaactttaatattgccattaacgtactttgaattgtagctctgagaatattttttggatttaaattgagggaatttattttgacctttaaaaaagcgttgaaaagcatcggctaaattgcgattagcactttgcaaagcagttgattctgcttgtttcaaccaaggatactcaaccttaagttgtttcaacagattattcatcccaaaggcattcacaaatttagcttccggattattcttgcgccgttcaatttgcatattaagcatttgattccatacaaaacgaacacaaccgaaggtttgccagagctgatttcgttgtgctgaatttggatagatgcgcattttaacggcttttagaaccattattttctcccttgactttcaatatatcgttttacaacttctaaaggcgctccaccagtgctaattaagcaatagctttgtgtccaaaaggctgatttccaaagatattgcttgatttctggaaattgttttttgaccattctggagctagacgatttgtaagcatttaaaaatttagccatttccgtatgaggcgttgctctaaacaaaacatgtacgtggtcctgatcataattccattcttgcaaattaatgccgtatgcttgtcccacaactacaaaacgatgtttaagatattcagatatttcatcgttaattacttttcgacgatacttaaccaccattaccaaatggtaattaagcaagtatactgaatgctgatttctatctaattctattgttatcaccacattttatagatatatactaaatatatcatagaacaaaagaaaaagcactaacgtgctttaagagagcgattcatcccctacttatagaagtggggtattctcgcaaatttatggataaaatttgtataagattgttttgattttactaaggaagtgtcttatcaatgggtcgtttagataataaagttgcaattgttactggtggttctaaaggaattggagctgctgtcgcaaaaaagtttattgaagaaggcgcaaaggttgtttaaccgctcggaagatggatgaaggacaaaaagtcgctgaccaattaggtgacaatgcgatctttatccaacaagacgttgctcggaaaggagactgggaccgagtaattcgtcaaactgtccaagtcttcgggaagctcaatattgtggttaacaacgcggtaattgccgaatacgccgatgttgaaaagacacctgctgaaatttgggataaaacaattgctgttaacctcaccggtacaatgtgggacactaagcttggtattgaagcaatgaagaacaacggggaaaagaatttgatcatcaatatgtcatccattgaaggactaattggggatcctgatctctttgcctacaatgcttctaagggtggtgtccgcctcttaactaaatccgctgcgcttgattgtgcccgaaaaggctatgacatccgtgtaaatacaattcatcctggttatatctcaactccactagttgataatttggttaaggatgatccaaaagcagaaggacacctagaaagccttcatccccttggccgtcttggaaagccagaagagattgctaacctcgctttataccttgcctcagatgaatcaagctttagtactggtttggaatttgtcgctgatggtggctatacggctcaataatattcataaagggagcgatcgtgacttcgtttttcgacgcgaagctagcctctgggagcccctgcaagcaacaataggcctccaacgttcggttttaccggacgttggaggccattggtgtactgcgccatttgtcttttatgaaaataacttggcttatgtcacaatccttttgtttcacattaaattccgaattaccaatgaaattgccaaaatcaatgatccaatcccgacaattatttgcataagacggccaggcaggtggcgaacaataatcggtcctaagtaacccccgattacatttccaatcatcaacggaataacataattccaataaattgtcgtctcaagggcgaacactatccaggatgttgtatttgtaacagtcatcgcaacattttttagcgcattattaactgcaaagctcttttgccgattgatcactgtcagcaaggttagcattaacactccggcacccgcattaaagaagccggaataaatcccaacaataaaaataccaatgattgataaaaattggccgatccgtgacttaccaaataatttactgtttcctgccatcgtccctgtactttgcttcggatgatggggaaacaacaagataattccggctaacgcaatgcataatggcaccagttccgcaaaccacttactggggacagcaaatagcaaaaaagccccaataatggaaccagcaaataccaatggcaaaataatccataattgtcgccgattatgctctaattccttaaacgatgaaaagaccgaactatagttaccagtgactgtcgaaaaagcactcgttacgtttgccatcactggcggtaaccccaatgcaagcagtgaaggataggagactagtgatgctaaaccagcggctgcactaataatccccgaaagaattccaattcccagtaataataaaacaaaaactactccactcatttttgaaccatccctttaaatgctagtactaattgtaaaccacttttctaagataagtaacctaattaacgatttgcattctgttataatattagctatgataatagagaataaatctggggtgccaaacggctgagataatacccattgaacctgctctggttaataccagcgaagggagattcagtgatattaacttaatgattaactccatgattttttgtcatggagtttttttgcccttatatcttaaggagttttattatgactaaacgttcattacatttgcgtgacattattttgcttgccctgattggaattatttttggtgtaatttattttgcagccagctttgtctataacgggctaactgttctactgacaccaattggttatggtccaatggctaacgatttaacaatgggaatctggtgtatggctggaccgcttgccggctttttgcttcggacaccgggagcggctttccttggtgagtttttgggagcagccgttgaaatgcttctcggcgatcagtggggagcagccaacctaatttctggagcggttcaaggtatcgggtctgagctaggttttacttttacgttctataaaatgtataactggttaaccctcctcatctcatccctcacccttacatttgttacctttggctgggattggttccgcaatggctataaccacttcagcggacaaatgctaatcattatgctcatcgcccgtttcatttcaatgtttgtcttctctggaattctggttaaattgattactaaccttctccaacgagcccacttaattaaacactaagactatgaaaaatatacaatttaatgatctttcatttaattttgatcagcaaccgattcttaaaaatatcaccgccaaattcactgttggaaagattcacttacttaccggggtttctgggagcggtaaatccaccattctcaagttaatcgctggtctcctgcctaaatatggtggtgaaatagttgctggagcagtcgatgtaccaacagatgcccatatcgggatggtattccaagatccgttaatgcagtttgctcttgatacgccacgccacgaattagaattcactctggaaaattgccaagtcccaactgacaaaattccagaacgcgttaaagaagctttacaattcggtaaagttgacgaccttgctaaccggttaatcaccacgctttccggtggacaacaacagcgcgtggctttagcagcagctacggcaatgcaaccgaacgtgcttttattagacgaaccctttgccaatattgacgaagaaaaccggcaacttatccttaaacaattagtccgcctcaacagtgactatcacacaacaattatcattactgaccatgatttgcatggttacgagcgactacatccattggtttggcaattaactaaggggcaccttgctcaactttccagtaaaaatagtagccaacttttaacagcgagcgcgactccccaaattaccactacccttcctccgtcaaccttgcccacgattatcaaatttgatgaattagcaataaaacgagagaattattccttacttttaccaaccaatttaggcattgttaaaaataaaataactttattaaccggaccaaatgggattggtaaatctacccttctaaaggcaattgcccgacttttgaaatatgaaggaaagattgactatgcggaggaaaacattcaaaaaatatcacctgggaaatattacaagcatctgggattgattttccaacatgccaacgatcaattcctaaatgtaaccgttggcgaagaactggcattaggctttaaaacttgccagaacccctattttaatcaacaacaagtcaacgaagcattagcagctcttggtctgaacggaagagaagatcaagttgtttattctttgagtggtggtcaaaagaaaaagctgcaaatccttctgatgttaatgcgcggacaagaaaccttattgcttgacgaaccatttactggtttagatccaacatctttaaagactgtcctgcaactaatcaaagcatcccaaaaagaaaaaccacaaactttgttgattgttagtcatcaattaagcggacttgatggtttcattgattatcatcttacaatgaatcatcaacgtcttaattatgttggagggagttatgaatcctagtttaaaattattacttgttattttgctttcacttgagctgacttttgtaactaagctgtggattaatctgattgtcattgtaatgtgtttgctaatccttattcatcagcgatttcactggcgacaattttgctggttggcttttgtccccctctttccggcactagctatttttattacaattgtcttcttcagtcctagtcacagtttctttgatggaactgttctttttagtcgactttacgtttatgtctgccttggaacggtctttacatttacaaccgataccttaacgcttgctcgctcattagaacaaaattgtcaccttcctagcaaatacgcttatggggtgctcgccgctcttaatctgattccgaaaatgaaacaagccgttacaactatttatacgaccggacaaatgcggggtgttaatttacattggtggtcaccaacgctctacttcaaagcgattctggttgctattcaatggtcggatcaattagcgcaagccatggaatcacgcggtttcgtagaaggacaagcacgaacagctaccgtgaatatcccgattaccagccacgattggctttcttttttaagtattatttgccttgtacagataattgtaattgcgctcccttgagttttcatgcgataataatataaaaagaagggactgatatagtgaacgataataatttaacggaccggatcgttaatgctttatcctatttaagcatcttatttttaccagttatctttccactaatcgtgtggataattgcaaaaagcagtgatcgaccaactattgctaaaaacgctcgctatgcattttggagtcaaattttcccattgttatatgtaataggcgcaattttagtctttagtgtcttttcattaacccccgctaacttccacgggggcgcattgtttggaattctcctaacatttgctcttttattagcccttttgttatttatttataatattgccatggccgtgaaaatgctgattggccgtgagtaagctaagagagtagtaagtgggaattaacctcctcgacaaggcggtgggctaaggatagaacggtgattagcacggcacgggctgattatcgttcggacttagcctcgagccttgtggttacgacgcgaagctagttccacgatatcttaacaatgttcgtataaataaagaggctgttgaaaaaaataaatttttccagcctcattttttatccaaaatatcaagtgaggtgattaatcgatggaaatgattttaggcattgttcttctattgactgctgttgttgcagctaatgttgttcatcttgtttaccctaagattccactatccatctatcaaattattgcaggaattcttttagcatccctgcctactgaggccactaactttaccatgcatccagaattattcatgatggtgatcattgctcctttaatgtttaatgacgggcagaaccaatcattccgttatctttcaagcaatattaaatcgatcctatcaatgactgttggattagcacttgtaacggttttgattactggtagttttttacattggcttcaaccaggaacgttctccttagcactcgcctttatgttggctgcgattgttacgccgactgatgcggtcgctgtaaagtcaattactactaatatgaaagtaccgaaaaacgttaatggtgctctggaatatgaatccctctttaatgatgcatcgggaattgtgcttttagatttggcgctggaaacctaccgttctggacaattttcgcttggtcatggaatctggatctttgtttatgttttctttggcggaattatcttcggagcagtgttagggagtctgttaattagtctccgtactagtttgatgcgaaaacatgttgatattggctccatcgttattccgatcaacgtaatgactcccatcgttgtttactggttagctgaagaactacacctttcaggaatcctagccgtcgttgcagcaggagttgttcatagtatcctctatgatcgaatgcggcttacatctactaaagtgcaaatgtctactaccactatttggaacatcattagcgatgcgttaaacgggttagtatttgttcttttaggggtgatgcttccgccggtacttggaaggacttcttggcaaaatctgggtgcaatcgttgccttagcctttgctatctatattattacaacccttttaagattcttatgggtccggtttaagctcgtcaacattcaatcgactaacctcaaccgtgatagtctcttaatggcgttaggaggaattcacggaacaatcactctggcattggctttctcgctgccagttctgattaacaaccatcaatttgcgttccgtaattcaatgatattgattgccgcaattgttattttgattagtattgctgttggcgcaattgggtatccaattattttaccgcctaaatctaagagttattcgaagagtgaatttcaaaaagaacttattaaaacagttcaatatgctattaatgagctacggacttcagaaaaatattccccagaaaaagccgttgttattgaccaattgagtagtcaaatgacgcaataccacgaatttaatcgtaatgtttatagtcaattaatgggtaaagctcatcaaattgaattagctaccttagaccgacttaacgaagaaggccgaatctctgacaaggaggccaaattcctcgttaattttgttacgcggtcgattttccgcgtaaataaacacagctttcttgaattatgggtcatcttatggcaccggttaaaatggcgctttattcgctaccgccatctcaaaaaaggctcccgctataatgtggggccaaaatatcaattaaccaaggaacagcgcgctgaaacagctgagatcctagaaataattaatcgtgaaatcgataaataccttcatttgattgaaactccacaaaatgcgaatgaagttgccatggtacgacggacgtacttccaacgaaaacgattcttcctccacgatatttcgatggataccgacctcattacttctttatttattgaggcatttcagcttgaacatagttatgttcaaatgcaacttgctgatgaccaattttcacaagaattagcaaacgcattaaacgaacagatctcaactgatgaattggtttatactcaatcattagactaaaaaaggaaattgctgcaaaatcttgcaaagcaatttcctttttatgtttaaagaaatgtaagtaaaaaagcaatcaatgctggtaaaaattgaattagaataatttttttggttgcagtaagtgcaccaaataatgcaacaaccatcacaaaaaccaagagcattcgccatactaatactaaggttgccccactaaataaccagtaactggcgatgatagctgctcctaaggcgccgttataaataccctggttagcaaatgaaacccgtgcttcatgctgttgcgtaaacttaagcggtaagtcaaacgccttggcttgctgtgccgggttaccaaagatttctaaggccataatacctaaatgttcgattgcaacaaacatcgtaacaataattgcaagcatctttttcctccaactatttaatatagtgatctaaaaattttgtcaaatggcgccgatactcgctaggatgggtcgcatatgacttcgcgtgcgctgctcctggcactacccataattctttacttccctctgttgcacggtaattgcgataaaccatttcagttggaacaaaattatcttttgctccatggataaatagcattggacgatgattatgatgcagcatatttaaggagctggcttcatgaatgtaaaaaccattcttcacccgattaattaaactcatcgtacttattaatggcacccgtaaaaacttcggaatcccatataaattaccggcttcataattcaattcatcattaagactcgtatatccacaatcttcgacaaatgcttttacttgtgacggaaggttaatgccactagtcatcattgttgtcgcaccacccatgctaacaccaaataagactacctgactatcttccccattatgccgaataagtttattaatccatttacgaatatcataacgctctggccatccataaccaatgtatttcccttggctttgaccatgagcacgcgcatccggcattagaacattataccccatctgatggaaaagcgcggcatattcgcccatcttctctttgtcacccataaatccatgggcaattaccacatttttagttgtcggtttagcagcagggatgtaatcagcaactagtttataatttccacttgccgatttaattgtccatttttcttttttggcatgcttaaaccacattttctgctcatacaatggatcatttcgtgaaattttagttgaattattaataaaatccttatgccccggtaccattgccaccgagaaaaaatagctactagcggcaaagattgccactgcgattacaactacaattccaatgagccatcgccaaggatgccactgtttcttttttgtctttgttttcaaaataattaaccccatgtcgtatcatttaatcaatgcgcctagtttagcacactttctgttattttgcatattcttttcattcaaaattgttatgctaatgttaaaatagataatgatatattaagggagtgaaataatgtttccagaacgcctacgagcacttcgcaaaggacaaaagataaccttaaaggagcttgctacccatctcaatgaaaaccttggccccaatgaaaagccaaacactgcttcgcaaatcggtaactgggaacgcggtattcggaccccgtcatacgttgaagcacgaaaactagccgaattctttgatgtcagtctggactatcttaccggaaaaactgatcgtgatgattttgatttagcaaaattatttttctcaagtaagaacctgtcgtttaatcaaactgtactttcaagtgatgatcgatatgaaatttttcaactaatcgatggttacttaaagggacggcataatcgccgggatacagacaccttctatggtaagcaagaacaactagatttaaaacttaaataaggagtttctgatgaatcctaaaaaattaaaacagctaaaaaagcgggtaaaaaaagctcatcaaattgttaatgagccttcatatattcaagaactaaatacttaccgtgacctattcgatgactttcctcctgtaaaatacctcattaataatgttttagaaagtgatcgactactcaaaaacggcttattgccacaacctctaccaaaattattattgccggataacattcaagataccattttcaaaaaggttaatgaacagttcccacaaggtgatccacgtggcgataaactttggaataaatatagtgaggcgttgccaaaattagataaggcgttgcgcaactatcgtgattatctcgaggaaacatacggaatgtggtcatacgtcaatgcaccttttgccaaagcactttctgattatttaggtggggcaccgacattagagattatggccggtaatggttatatttctaagggattacgcaataacaatgccacccaaaggatttatactaccgatagtcaggcatggataaaagaaaacgaaacgggcaaacaccctgtcactaagattgagaagttggacgctctagaagcaatcaaaaagtatggtgacgaggtcgaatatgtcattatgtcatgggctcccgataagggtgaaattgactgggaggtcctgaaacttcttcgttcaacattccctgaagtcaaattattagttattggcgaaaaagatggcgcaactaactctaagaaattctggcaagaagcccaattgagtcaagacgatgagttacagaaagttaatgctaacttgcactcgtttgatttgattgatgaacagatttatctagcaaaataaaaaagttgaggttaaaagagaacaaaagttttctcttaacctcaactttttatttaatcaattttagccactaattttccaactacttcatgatttttaatcgctgttaagcccttaataatttgatcaaacggaatcactttctcaatcaaaggctttacatccccattagctattaattttaacatttccgcattcattcggcccaaatcagcttgctgatttgggttgccactgagatgcgccccaccaagattaacgacatctatccctagaccgcgatcaaacattggaacattatcaagtgaaggaacgtcaacaatcgttactaagcgtccattataggctaaccgccacaaatcaagttctgcttcttttttacctaccgtatcaatgatcaaatcaatgccaagcccatcggtgagatcggctaactttttatccacatcttcagtttgatagttgatgattgtatctggagcaagctgctttacatagtcatatttactagatgaaacagttgtaaataccttacaaccatgaagtttagcaagttggatagcgatactgccaagcactaacgccgccttcaacaattttatagtcgaccggattaagcccagcagcatgcaccttaattagaacttcatgttcagccggcgtaggaactggggcttccgcaaaattcaaatcttgcaatgaacgatctgctgctttttcgactactaaggctttcattttttcgctctccttaattttataataattattataacactttgcctaggcattcttcatagccatcttattaaggtagtgccaaatttgcgaacgatatttccgtaatccgaataacatcacaagataaatgataattgctagtgaaatccaaacaggactttctgatataaaggcagcaaaaaccaatgcattcaatggtcgcgccactaaattaaaacttgttaccaggactaccccggttggaattgcaacgccatagtgggccactgctgcagtatagaccggactgagccaactggccgcatataagcctaaactaaaccacacaattcccgtcgcaattacttttaagatatttccacgagtcaccgcgacaattgattcaatcatgtacggaattgcaattaaatcaactaccggaagggtcttattgccaggaagaataaaagcaattaaaaccataatcgggattaaaatgattcctgaaattaaagtggctgattctccatagccaacgccatcatcaacagctaggaaccaccgctttttatcataacggctatttttattttcgccatgtcgttttttctgctgctcatcaatttcattcgcaatgggaataaatgcctttgcgaatacgtttgtaacaaggggaaagatcgccataacggcagctaattgaatcgcaaatttagtaatctgtccccaagcgcttattttccccagtgaagataaattacccaagatcccaattattaatcccaggataattcccattgtaattggttccccaaagacacctagttttttctgaaaatctttaggagtcattttcactttgttaaatcccagtaaattccataacggatctaaaataatcgctggaaccacttgctcgatattatgtaaggagtcgacagtggtattctcaattccataatagtctgcccaccgatctgcttgaatttccgctaagactagtgagtacaggagcataaaaaattccagccctaatgatagccaataattatgagttacataaaaagctagcgtgccccaaatcatatacccaaaattattccaaatattagaaggcagaaatactttggtaacgccaagcgcaaataaaattaattcagttagtaatccaaaaacaaaaaacgataaaccaaccgttgatccaaacgctgctaatgaccctgcttgccagccgatatcaaccactggtagtttaatccccgtattatcaaccatttggcggacaatcttagtcaccactggcgtaaattctgtgataatccaggtaaaaccagttaaaccgacaccagcatagaaagcactcatcattgctgtcttaggctgcactcgtagtaataaagcaatgataaaaattattattgggacaactacactcgcgccaaaagtttgaaaaatagcattaacttcttgaagcatgttttactccctccatcgaataaactgttacctatattttccctaagactggtctttttagcaaggcaaaaggtttatctgcgtttgctatagaaatctattcagaaatttgctacagtatgatgagtttaatctattagggagggtacattttatgaaatatcgtttacaagctattatttttgtcttcgttgcctttatgctcgggtgtaacgaatatatgattgtcggcgttttacctgatatcgctcacgaataccatgattcgcttggtaagttaggcctacttgtaactgtatttgccttggtttatgctattttcactccgattattacttcaatggcaaatcggtggcgacgacatcatgttttattagttctcatggtcatcttctttatcggcaatacgtggacagcaatggcgccaaactttatttcaatattgctttcgcggatcctaactgctagtgttgccggtgcgattatctcaatggtcctcgtaatggcgagctatgttgcgccgcgtgaaaaaagagcaagcctggtttcatgggtttttgctggatttagtatcgcttcagttatcggcattccaatcgggaccgttatcagcactacccttacttggcatgacagtttttggatgatttctggaattacgatcattgtttttggcgccttgatttggctcgtcccacgtgatacgcctcaatttaagagcacccttagtaaacagtttgtgttatttaaggattcacgaattattcttggtgttagtttcattgttgctgtttgtgcggccgactacacaatttatacctatattcgtcctttaatcactaacgaaatgggctttgataacacatggttgaattggctcctattcggaatgggaatcttctttattattggtaataaatttggtggatacttggctgaccgtggcggaattcatcgtctcagtggaatctacgcggcaatgacaatcttatttctcatctttggtcctgtcttaccattccagtggggtgccattattattgtggctgtcttatgtattgccttttcatgctatggttcttccacccaattaatgttccttgatattgccgaaaaacaatatcctcaatcacttgacttagcttcatccttaaactcaatttttgctaatattggtatttcactaggctcttttactgcctctcaggctgtcaccttcactgccatgaaaaatctcggttacgttggcgcagtctatgggcttattgcaacaatactagtcatagtcctgagtaaaaaatatacgggaatgcgcaattattaatcttaactttgagtacagatttttccatctgtgcttttttatttcccgggaaattaatatgcaactaatagtagcggggtgagcaattgttgttatctaaggattctattgaccttttgattagatccaattaaattctaaatatagattttgaaagggagctttttgctatgccgtattcttttccgcatcaactgctcaaattgcggactgaaaaacaattatcacaagctgaactagctacgcgtctattcgtttcccgccaggccgtctctaaatggtaaaatggggatgctgaaccaagtatcgataagctaattttgcttgccaaggtttttaatgtttcattagaccgccttatcttgggaacaaacgactttaatcaaccagtggtaaaacttaataatattgttaaaacttttaactcaccagttctcaacagccttgatttaactattcacaataatgaacgcattgcccttcttggtagcaatggcgctggtaaaacaactttagtaaaaataattgaaggtgctttgaaacccaacaaaggtactgttaaatggtattttagtaaaaatgattctttaaatatcatgtctcaagaaaatgttttaattccaaccctaaaagttaaagagcagattatcttgacagccgccataactaaggtcggttcaaagcaacgaatcaattatcttcttgatcaattcaaattatcatcccagcaaaatacaattattgcgaaattatcaggtcgacaaaaacgtcgcctttcgctcttgcttagtgtcctccgtcagtccaagcttctgatcctagacgagccaactgttgggatggatttagaatcaattgactatttttggcattttattgaaaaggtttcgggaagtattttagttattactcatgatttcaatcaaattgataaattcttttcccgtgttctgctccttaaagatggccaaatctctcaagacatccctgttaaggaaatccaccaacataatcagacaatcgaacaacggtatcgtcaacacaatcgttaggagttttcttatgagcattatagcaattcaactaaaacaagttttgcgcaatcgtcgtttctttctttttactattctactgccaggtatttggtatgtgtttatgattcaagttgctagtacatccctccccgccactggcaacttccagctcgctttacttttgcttgctctcctgatgggaatactcggtaattcgatcgttactttcagcaaacggatttgtagtaataaggacttctatattcttcaatcgcacattagccattattctctgtgaaactatttattttcgcaattaattacccaagtcatcatcaatttgttcatcaccatcgtaattatgattcttgctattttccttcatactatcgagttcaacttcattactatcactagtattttgttaaccaatatcatcggaatatatctaagcgtgatcgggtttgcaattgggctttcctttgacgcaccaactatcgatgccgctggaaccccaatcctatttataatcgcaacttttattattccgtggaaacacctcttaccagctaattcttttattgatttctttactaatgttcaaaagctatttccaacttattatctttacgacgaccttgaccatctatcggttagtcatcttggactactatttgtaactgcgattattactctgctaccttggcttagctttatctatcgaaaattaatcaactaaaaaaccggaatacctagtactaaacatactaagtattccggctttttcgtgtattgatattatctcaagtcaatcagcactgtccacatggccgattaactagacacctcacaatccggtgagttaatgtgtcccacttgtcaaaatgtcaatggtagctcttagggtcgctaccagacctctcgactcatcgcaaattataatttagcatatttgacctatggatgcaactcttatgctcttgcttccattatatctgcaaggtgttcggctacccattcttgagttttagtaatcaaatcagttgtctttccactttgatcggtttcatttgctaattcatcgatccgcaatcccgttttattaatatcttcactctccattactaaataaagattaacagggtactcgatctctttatccaataatttaacatctaatcgctctgcctcatccatcggtatgttgattaggttggtttctaagcgaaagctaactggatcaccttttttcattttaatgttcatcttatattgaccaaggtgtcccgtatcaagttgttcaatcataaaattaattgcagttgttaatactgttttttgctgtgattgggcagcagttttttcaacttcttctgtcacaacctgatcgctcgtcaactgtgacaaataatcagctactgacatcttcattttttcatttgctccttcattttttcaattttagcttttgtatagtctgcacgctgttttgcaccataataaacaccagcagctcccactaaaattccaacaatacttagtgcttgaataaataatccgtatgcactttctcgtggacttaccatttgaaatgcggctaaactagcgattgcaaaataaagatttactaaaatcgttgcatatccacaaaagcgcatctttaaaaacgataatccgttaacaatgattgctaaaacaataaagaggagcagccgcggccatacagatgatgatgtcagcgagtgaccatgctgaacaaacataaaagcatcaaggactaatgcaattactgctgctactgatgttacaataacaactttttcattatttttcatttattttgccaactttcttttttgctatccccgcggatgaccaatatttttacatcccttaattaacgaaaagtaagtgggaattaaccttctcgacaaggcggtgggctaaggatagaacggtgattagcacggcacgggctgattatcgttcggacttagcctcgagccttgtggttaatttccacgatatcttaaacaatgttcgtataaataaagaggctgttgaaaaaacaaagttttttctcagcctccattttactaaattaagttaaaaagctcaattatgcgagtaaatcagctacttcagcggttggaattcccgtaatatattgttgggttccttccgcttcaaggactttagcaatttcatcatggtcatacttaatcccttggagcttttctgccagttggttaatatcctgtgggccaaagaaatcgccatagaatttcacgtttttgattacgccatctttaatatcaaagcgggcatcaattgtccccatatcaaagtgtttccgccgcttaaccgtaaactctggcgacttaccatagacccaatcccagttgttatagtactgctcatagatcttatcaatttctttttgatcttcaggggtaaccatgtattgcttatccttaatctcctcaaggtcgtcaacatggaagagaccttttagcaattcatccctaaatgttggcacatcaatatcttggtacttttcatccaagtatggacgaagattcgtaacccgtgatcgaactgatttgatcccctttgaagcaatcttatcttttgccacatgaagggcatccgcgacgacacttaagtcaacatcaagcattaaagttccatgggagaacgtctttccattacgtgaatacatcgcattccccgagaatttcttaccatcaactaaaatatcattacgaccgctgacttctgcactagtagcacccatttgatgaagaacattaacaattggctgggtaaacgatttaaagtcaccgaattcttcactatcacttgggaccacaaaactaaaacagaggttccctaagtcttgataaacagcaccaccgcctgataaacgtcgggttacccggatattgtgttcctttacataatcatgattaatctcttcaagcgtattttggttccggcccacgataatacatggttcttcataataaaatagtactaaaggctctttcccaaaatccttattattcattaaatattgttctgtagctaaattcattccaatattatgagaagtcattgaaacataacgcataactagcaccctcttataaaaacatcaacataaatagactaaaaatttacttttgtcatttagtcatccatttgtagtgtacgtcttttcgtaagcgtttgcaatatattatcgacaaagcaaaaaatactttcttttttacatctttttagggcgaaaacattttataataaaggtataaactttcggaggtgtctattatgacagaaatttatccatacaaacacattctagttgctgtcgatggctcaaaaattactagtaacgtcttagaaagtgccattgattctgcactacggaatcatgctagccttgatatcttacggatcgttcaagtaacgcaactaacagatggctatagtaatgcggcccttagcaacgaagaaacatataacattgttaaaactaccaaggaacgactcgatgacttgaaaaagcgcgcggtcgatgcgggggttgaagatgttaacgttcatatccggtttggaaatccaaaacgtgttattgctcatgaatttccgtcagatcacaacaccgacttgattattctcggtgcgactggtgtatctggtcttgaacgctttgttcttggctctgttacccactatgttagtcggatggcaaaatgtgatgttcttgttgttcgcaaaaacgaccatgttaactaggtgaaaaaacggtgaaacaaattgttactggcatcgttgctcatgtcgatgctggaaaaacgactttaaccgaagcactcatgtatgaaaccggcgctattcgaaagctaggtcgcgtggataatggagatgcttttttagatcctaacacactcgaaaagcaacgtggaatcactctttttactcatcaagctgagctaacatataatgaccttgcgcttacccttctcgataccccaggacacgtcgattttgctagtcaaacagaacaagtcttaccagttcttgattatgcaattcttgtcgtttcagctactgatggcattcagggatacactcgcacattatgggatcttcttgctcgttatgatatcccgaccttcattttcattaacaaagaagatgtgattggtgctgatcctagcagtgttatcaaacaactgcaaaaagaattttcgccggcttgccttaattttgctgatccattaactgacgaagttcgtgaaacaattgccatgcaagatgataaagttttagaaaactacctcagtactggtagccttagcgatcaaacaattcagcaattgattaaacaacgtaaagtgttcccttgttataggggagcagccctaaagttaactggaatcactaatttcttaaatggacttgagaaatggacagttacgcctgcgttttctgatgagtttgcggcgcgggtattcaagatttcccatgatgacaagggtaataggcttagttgggttcgtgtattcggtggcaaaattccagctaaatcagttttactaaacgaagaaaaagtgaaccaaatccgaatatataacggggctaaatttagcccaactcaggttttaaacgcaggtcaagtcggtgctcttactggattaacttccacatcccctggacttggtcttggtaaaacaaagccactccctgcgccagtcataaaaccggtcttaaattatgccgttaaagttgctaaagaggaccttcatgcttgtctcaacgccttaaaagagcttgaagatgaagatccacaactacagatctcttggcatcctcacatccaagaaattcacgttcagattatgggagaagttcaacttcagatcctgcaacaattgcttcaagaacgttaccaattggaagttacatttgatgagggaaacgttctttatcaagaaacgattactaacaaagtcgaaggggtcggtcactttgaaccattacgtcactatgctgaggcccaccttcttttagaaccaggaaaacaaggctctggaattacaattaacagtgactgcagtcttgatattctggatcgcaattggcaacaccagatcttaactagtttacaggccaaagaacatttaggagttcttataggagctcctcttaccgatgtcagaattaccctcattggtggtcgcggccatattaaacatacagttggtggagattttcgtcaggctagttggcgagcggttcgccaaggattgatggaattgaaggaacaaaacgaatgtcaattattagagccttggtatgctttccaccttaaagtaccgaatgaccaagtaggacgcgcaattaatgatattcaacaaatgcatggtacgttcgcgcttgatgaagctaatagtcaagacctaaccctgattacgggaactgctcctgttgtgggcatgcgcgactatgtccaaagcgttcgcacctacactcacggccagggtcagctcgagcttgttgttgctggctattatccatgtcataatgctgaagatgttattaaagatgttaattatgatccggttgctgacctaaagaacactcctgattctgtcttctgtgctcatggtgctggtttccccgttccatggaatgaagtccccgcaatggcgcattatccgtatagaaaataggttgttgataaagagagaggctgagaaaaaacttcgttttttcaacagcctctttatttatacgaacattatttaagatatcgcggaactagcttcgcgtcgtaaccacaaggctcgaggctaagttcgaacgctaatcagcccgtgccgtgctaatcaccgttctatccttagcccaccgccttgtcgagaaggttaattcccactcactctcttttttcattcaattgtcaatagcaatccatacaatgcacctaataaattagcctcattgccaaactttgcggtcattatttctggcatcgtaacatcatcatgaagacggtaatcactcttctgcagaatcataaattgcttctttatttcatcaattaaaattttttgcgtactaatgccaccaccaatgagcacacgttcaaggtcaacaactgtctgaatatttaaaatcaaaacagctactcgccgacaaaacccttcaaataaggaccaaataactggattatgacaattaatttctttaaatactcgtcggccatcagttttatccttaatatcacaaatatcagccatggtttcaatcatcttaactgctgaagtagtagcccccattgtcgaatagtgaagttcaggcgcatcattatcaatgatcatggcacttaattcaccggcctgaaaatgcggtccatgcaagagctgattattaataacaatcccgccgccaacggaagttcctaatgtaattacagcaccattactgataccgttgagattgccaagccacatttctgctaatgtcgcacaattagcatcattaccaacatatactggacaatgagctcgtgattccagataggctgcaaagttaaaggtccccataaagccaagggcgccagtaaattttacctctccagtcgtcggattaacgactcctggaagactgacacaaatcgcagtaaccttttctaaaactggttcaaccacagcaaagattgcagccagaaacgcttctttttgatgaggagttgggacatggtttctctcaaaaatattaccagagtgatcaattaatgcactctttatctctgtcccaccaatatcaatactcaaatactgtcgttgcataactcctcacctcatttctcttatattatacacgactccgctgttgagggtaccaaatacaaatactgatgaataagcccaccagggtaaaaggcaaccaactaaagccaagttgatacaagggaaagtatttttctgcaaaatggattaatgacatgctaaatgtggtatcccgtaaaaccggtgggaaagtatttaccatatcaaaaaatgcaggaatcattgttatacctgtcgtgattcggtaaattaacgaagctcccttgaataggggcgaaaaaatacctagtaggatcaacacaatggctagcgggtaaagaaacattaaaactggtatcgaccatgaaacgatccggtccagtcccatgttagcaactagaaatgacaacaggcaattgccccgcaaaaaggctttataagaaatctgggggaaacgatagtggaagtcctgggcaaaagcgactactaaccccatcgccgttgtcatacacgtgattgtcgcaagggttaacaataatacatttccaaaatctcccatataataatgagcaatttggtttaatgttgttcccccattggctgcgattgtgaattgataccgactcgttgttcccaaataaattagtccaatatacaaaatcccaattcccaaaattccaatcattccacccttggtagtagcaagtgaaactgattgttgagatttaaaaccaagttggcgaattgcggtaataatcgtaacgccaaaaaccaatgctgctaatgcatcaatagtattatatccttgaataaaaccattactaaaggcatgattaacatattctggagttggttggggagtagttgtacttcccattggatgaacaaaggcgagaagaaagatcaaaaataacataataaggaaaattggatttaaaaccttaccaattatttcggtgatttttccttcacgcgttgcaaaaaagtaaacaattagaaaaaatgctccggtataggctaataatccccagccttgcatccctttacttaaatatggcgcaactccaatcgtataaggaacagttgccgtacgcggggttgcacataaaggtccaataattatttgaaccaggataaggaaaataagggcaaaccttttcccatttggtaaagctagttcatataatccatttgcatgtgtaatactaatcgcaagtaatgcaaatagcggtaaaagaacaccggaaagcaagaatccgcccgttgctgctatccactggttaccggctaattgtcctaaatgtacaggaaaaattaaatttcctgccccaaataacattccaaaaattagcgacccaattaccaagtaggttttacacgctgctttaattgagttcatagttaatcactcgctccttttctctcaatttaatctgacgctaaattataccatgaaatagtcgctggaacagaagtacattttaatcaaaaaggaccgttacatcctctcaaatgttaacgatcctttaaaactaattttttaaaaagttagctactagtttcaaaatttcttggcgtcgtgagccattaaacatatgcccttctccaggaattaaatgcaactcactgttaggcatgattacattatatttctttgatgcttcaggggaaaccacattatcagctaacccatgaattagcagtgtggggccactataatgttgcgctgtttcgtaaattggtaaaagctgcgccgttcggaagtagtcgccgccaacggtaaagccatgcatatcaaccgtttctggtatatggttaaggtcatattggcttccctgacaaacaccttttagtgcatcatcttttaaggttgcagcaggtgccagcagtactagttttgtaataatatcgctataataagccgccagcatcaaagcaactaccccaccttgcgaatgaccaattaggtaaatcttctttgcttgcatagttgtgtgagcatagtcaatgattttcattccatccagaatttcactaaaaactgtcatatccttgaattcaccatcactatgaccagtcccatcaaagtcaaagcgtaacgttgaaattccttgttgatttaaatagtgcgaaagagcatacagaattttagaatcatcatatcccagattgcccttaaagccatgcatcagaattgcgactgtatcgtttttaatcgtcgttgttccctcaagaagaccatatagagatcatctcgtttgattgttatttccatcaaaccacctcccacttattatacactgtttgatttaatgttttagcttctccaacattgcacggtggtgtgcctcgtgtttctcatccaccttgataaagaagtaagaaaccgcagccaatacggcaactacaacaccaactgtaatcgtcttaattgtaaaattggttctcatatagcatgagattaagagtactaacaccggaatgatatattttccgagaagcttaaacccgtgattagggaattcattagtatgtttaaacttaattactgctaaaattgatggaacatattgaacaaacgaagcaagcacaatacaagaaacaagaaagaggtaagattgagtaactaataacatcgaaacaacggctgtcaggataatcgctacccatggtgcatcatggcggttctttttaccaacccactttggtaacattgcgtgttcattcgctagtgagaaaattaatgacggagtgttaaaggaggccgcaaacgctaccccaaaaatactgatcaacattcccacaatcactaaaatgtaccccccatttaccgacaccagttccaaaagcattggcaattagtgtactatactttgacatcctagttcctaaaatacggattgctactagcatcattagcgaatacataatcgttacactaaccattacggcaattaatacgcgcggaatatttttctctggatcggtcatttgttttgcagcaattgggataaaggaaaagccagtaaacatatagaagacaacactaaaggctgctccaaaatgtttggcaagcggcattgccccggtggttgctgcatgagggattaccggtgaaaaattagcaaagtgaatacaaaaaacgccaataacaataaaagcaaggatcgtaatcatttttgcagctgaagagaggttatcgaccaacttaacaagcgtccggccgaagaagttaatgattgaaaataataaaattaagccaaaaacagaaacatagtatacccaatgagtattaaaaagtggtaaaaagcttcggagagttgtcaataaggctaccacttcggcagataaagtacagcatcctaaaagccacgtaaagatgccgagctcatagccagtaaaccggccaaatgcattatatgaataaagccaagccgcacctgatcctgtaaaacaactagaaaggtccgcataacataacgcaaccatgctaaccgtaatagcggcacagagtaagacaaggacacttgctaaatccatatctttatagataacttgtggtagcaaaaaagcacctgacccaataacaccattaatacctaaaaagtaaattgaaatgaacgataactttttaggatttttctttttcgtattgataagctccaccttctatcctttataacaaaaataatattatcttcatttaaagtctattcttattttaaaggctttacaggtaagcaagttaaccaatttttatatttctaaacaaaaagagaccgagttaaactcgatctcttttcttaatttattaagtgtttaattagcaatcagtagctgattacttaagacccttccaagtccagttagtaacttctggtaagtccttaccttctgaacggatgtagtggttgtgcttgttgatcatgttgtccatcttggcaacaaatgcagcactcttttgttcgtaaccaggaacactttggatagcgtccttagctaagtggaaccggtcaagttcgtttaatacacgcatgtcgaatggagtggtgatatcaccattttcttcgtatgagtgaatgtgaacgttacggttagcacgatcgaagaacaatgcttggatcatgtcacggaatccgtgccatgcaaagataactggcttgtcagtagtgaagtaacggttgaattctgcgtcagacaaaccttctgggttcttgtcttgcttcatcaacttcatgatttcaatgatgttgatgtaacgaatcttcaattcagggaagttgtcatgaagaatgtcaatagctgcaagagcttcttcagtaggttcagtaccagctgaagcaaatacaacatctggttcgctaccttggtcagtagatgcccagttgatgtagccaagaccattgtcaactaattcagtagcttcatcaatggagaaccattgtgcacgtgggtgttttgaagttacaaagaggttgatacattcttggttacggaatgccttgtttgatacagccataagtgagttagtatcagcaggtaagtattccttaacaaggtctggacgttccttttcaaataagtgagtcaatagacctggatcttggtgagtgtaaccgttgtggtcttgttggaatacagttgaagtatcaacaaagttcaatgctgggtattgacgacgccagtaaagatccttagccttacgtaaccacttcatgtgttgagtaagcattgaatcaacaacacgaccgaatgcttcataagttgcgaagaatccgtgacgaccagttaatgtgtaaccttcaaggaatccttcagcttggtgttctgataattgagaatcaatcatccgaccttgtggagcaacgttttcatcgtttggttcgtgaatgccttccatccattgacgcttttggttgtcaaggaatgcgtaaagacggtttgacttagattcgtcaggaccaaatccacggaagttagttgggttcaattcagccatcttgctgaggtacttaccccattcaagcatatcttgctttacaacagaacctggagtttgaacgtcaacagcaaagtcacggtagtttggtaatacaagtggcttaggatcgataccaccattagtgataggattcatagccatacgacggttaccttctggtgtgttctcttcaacaagagcaactgggtgaccgttttcgtcaaacaattcttctggcttgtatgacttcatccagtcaataagcatgtccttgtgttccatgtcatcttgtgataccggaataggaatttggtgagcacggaatgagttttcgattgggttaccatcaagatccttagtaggaccagtccaacccttaggtgcacggaagatgattaatggccattgtggtaatgaatcatcgttgttttcacgagcgttcttttggatagccttgatttcttcaacagccttatccatagtcttagccatttgttcgtgaacttccatgtgtggcttgtaaccatcgaattcaccatcacggtcagcttctttgtaagctgatacgaagtatggcttccagcccataccttcaaagtacttagtaagttcttcgtcactcatccgtgaaagaatagtagggttagaaatcttgaatccgttaacttggatgattggtaataccgcaccatccttgattgggttgatgaacttgtctgagaaccatgatgccattaatggaccagtttcagcttcaccatcaccaatttcaacagcggcgataacatcagggttatctaagatagcacctacaccgtgtgaaagtgagtaaccaagttccccaccttcgtggattgaacctggagtttcaggtgcggcgtgagatgcagtaccgcctgggaatgagaagtgcttgaataacttagccattcccttagtgtcttgtgtgtattcaggataaatttcagtgtatgaaccatccaagtatgagttgttaaccataacttggccaccgtgacctgaaccttcaatgtagaacatatcaaggtcatacttcttaattacacggtttaagtgtgcgtaaatgaagttttgaggaacaatagtaccccagtgaccaattggcttaggcttaacgtcttcagcctttaatggttggcgtaataatggatcacccattaagaacaaagtaccaactgaaaggtagttagctgcacgccagtaagcatcaacactttccaaatacttcttggaatcgtaatctactgccattctaataaacactccttctatataaatcaatacgtcctgtgctctataacaacataacgtaaatcattaaatttacaatgttaatgataaacttttttttcaaaaagtcaacctttttacaaattgatacggtccaattataaaaaattaatctttttaaggtgttctttaacatttttctatttatcttaatccgcagaaatgctaatttacctttgtttaaccccgttcaataccaacagtgtacaattaaaatttcttttgaaaaaaataaattttacatctattttaatactttaaatactgctatcatattcactagttttcttggtctaggctaacaaaagtactatatttcatgtatttatagtgaattcgcatattagaaacttcaaacggcgtcccatcatccaaaaagaaaatcccttcaattgttccaaccggctctgtttcattcaacttcaataagtcttgatcttcatttgttgacggcgaaacaccaatcgtcataaatgactttgtaacccttttccccatcatatcttctaaataattaaaaattgacccattaacaacttcgggagaaagagtgggcgtaattctaattggaataaaacccgtttcaatcataaacggctgatcatcaattaaccgtagccgtttaatctgataaacaaagtcgttatcattaagaaatagttcttcttgaacatctttacttgcaggaacaacttggtaatcaagtaattttattccttgctttttaccatctacttggaaactgtccgttacacccaaattactaccttcataatggaacaatgactggttttttaggtataacggattaataaatgtaccggatccgcgtttcttaaaaataattccttgctgagcgagcactcccaatgcccgttttatggaactgcggcttacctgatagatttcacttaagcttcgttcatcaggtaaacgcatcccttggtatttattgtctagtattttttgttttatatcacgcatcactgagcgatatactaagtctgccatctaattaactcctcggatttaattaattcgcaatttaagctacacttttagtatagcaggcctattttaaattgggatccttttgtaaaatattggtgcgtcccagataaacttaggaggaaatttttatgagtaaaaaaaataaaaaaagcaaaatgaaaaaaacacaggtagaacaaatcctcgataaaaataacattgcttacgagcaagctgaatttccgactcaccaagatggcgatgtacgttcaatgagtgttgatcataccggggttgacgaacatattatttataagaccctagtattaaccggtaacgtaaccggaccgctagttggcgtcatcccagtcgatacacacttagatgagaaaaaacttgctaaggtttcgggcaataaaaaggttaatatggtgccgctaaaaaatcttctcaaaactaccggatatgtgcatggtgctaacacccctgtaggaatttacgagaagtttgaataccctatttttattgataacgaggccagagaacaaggcgatattttcgtttcgtcaggtaaagtgggccgttctattaaattaaatgccgaagatcttgccaccctagttcatgctactttcgctgatttagaacaaaagtagtttcttgacgattgacccggttaatgttgaagattaaactgattattgtagtttgtttgatagaaaggtcctgaaaagatgaaaaagaatttatctgcttgtaccactgtccttgtgggtcgcaacgcaacgattgatggttcaacaatggcagcacggaatgatgatacatttggtccacttacgccccaacgcttcgttacttatcccgcatatcataatcaccctaaccaagtaaaggcatacttaaataaatgtgtaattgatcgccctgctgatggttatcgttatcaaggtactcctaatgttgattatcgaactgaaggggtattcgatgagagcggctttaacgaaaaaaatgttggaatgagtgcaaccgaaagtgtttatgcaaatgaacgcgtccttgcctgcgatccgcttaataccgaaaccggaatcaatgaagatcttgtggtcgctgctacccttccctttatcgatagcgctcgtgacggggttgcataccttggtaaactagtcgccaaatacggttctgctgaaggaaacggtattatattcagcgacaaaaaagatgtatggtatatggaaatcgtcactggtcaccactgggttgctcaacggatccccgatgactcttatgccgtaactggaaatcgagtagcaatccagcaagttgactttaatgaccctgataactttatgtggtctgacggcatccaagaattcgttgagaaaaaccacctcaaccctgataaatatggttgggacttccgccatatctttgggactgctgatatttttgatcaacactacaacacgccacgccaatggtacggtcataaggtattaaatccggaaactgaatttgatccgcttgattttgatattccatttattatgcaaacggaccatcgaattacccttgaagacgtcgaaaagatcctcagtagccactaccaaggaacaccttacgatccactaggtcatgaaggtaccgaccagcaaaagcatatgttccggccaatttcactaaaccggacgcaaaattcccacgttcttcaggtccgcaatgacttaccggaagctgcttcaacgattatgtggatgagctttggtattcctacctttaccccatatgttccattctttggtaatgctgaagacattgatgtaagctatcgtgaaacaccagagaaactcaatatggatttaaagagtgcttactggatgtatcgggcgctttcaatgattgtcgaatcacaccatgcagaattttctaaggccgacttggattatctcaaagatgcccgtgaatatctctaccgctgggtcaatgaagttgctccacaggttaaggggatgtcatcttctgaagtcagtgctttcctaagttcaaagacgcatgaaatggttgccgaaatggctaaacgaacaaaagctttaatggctgagttagtaatgaatggactcgaactttctaagttaacattccaaatcgataaaaacttgtaaaaataaagatgaggctgagaaaaaacttagggcattatcgccctctgttttttctcagcctcaactatttttatgaacaataacaagataacgtgcaaaacaaccacatttttctttaattatttccagcaaactgactattataaagattagcgtaaaaaccttttttattcattaatgattcatggttacctgtttcgataatcttcccatgattaaccacgacaatctggtcagccttccgaatcgttgacaagcggtgggcgacaacaaaactagttcgttcttgctgcagagcattcatcgcttcttgaatcaagacttctgttcgggtatcaacagaactagtagcttcatccagaattaaaatttccggatcagctaaaaatgcccgtgcaatcgttaataattgtcgctgtccctgtgaaatattagaagcagactcgtctaagaccgtttggtaaccatcaggcagttcacgaatgaaagcatccgcccgagccatcttagcagcatgatagacttcttcgtccgatgtattctcgttaccatacttaatattttcaaaaatcgtcccagtaaagagccaagtatcttgaagaacaatcgcaatatgcttacgtaaggtatcacgagtcattgaacgagtatctttcccatcaagataaatatggccgccttgcggatcataaaaacgctctaaaagattaataatggtcgtttttcctgctccggttgggccaacaatggcgaccatcttatctcgtggtgctttaaggttaaagtcttgaataagcggttcatcagtatagctaaacttaatatccttaaattcaactttcggaatatcctttccagtaagggatggaatattctcaaccttatcactcatctctggttcatctaaaacagcaaaaatacgttctgccgaagcaattgtttgttggatggtgttacttaaattcgcaatttgggcaattggttgagaaaactgattggtatattgtagaaatgcttgcacattaccaagagtaatctgaccatgaataacttgaatcgctccaaccactactacaacaaggtacccaagattccgaataaagaccatcattggcatcattaagctagagaaaaattgtgctttccatgctgcttggtagtactgatggttctctttattaaacttttcttcttcatcttgttccttgttaaatgtccgcacaatcgtatgagcagcgtacgtttcttctacttggtcattaatttttcccaaagcggcttgctgacgaccaaatagacgttgtgaagttgaggcaacaaaagcaactaccagaatactaagcggaattgtgacaagggcaatgattgttaatttccaactaatcgtaagcattaaaatgaaaacaccaacaagcgttaacaaactcgtaatgatttgaatcaaactttgctggagggttcccgcaatattatccatatcattaaccattcggctcataatatcgccattattatgggtatcataatatttaattggcacccggcgcattttctcttcaaaatcttgacgcaaattgtaaacaacacgttgcgatactcgtgtcataatttgtaattggaggaaactaaatagtccagagaacaaataaagcaaaatgactgtaattccaatttgccaaatccgggtaaagttaattggaagggtacttaagtgggcaccagctttcatttctgcataccctttaagcattccatcataaatgatcgtagtagcttcaccaagaatttttggtgctaagattgacaaaataacagaaataacagctaagagaattgaaacaataaccccaactcgccatggtcgtaaataggcaattaatcgctttgtggttggccaaaagtgttgagcctgttcaggtacttgtggtcctctacgcacgatcaacatcccctttctcgacttgtgacttaattatttgttggtaagtttcattatgtgcttttaattcttggtgagttccttgaccaactacccgtccttcttcaagcacaataatttgatcagcatcaacaacagtagagattcgctgggccacgataaccgttacagcacgttgaatttgtgggtcttttgctaaagcagcccggagttttgcatcagtttcaaaatccaaggccgaaaatgagtcatcaaaaacataaatcgatgcgggcttaataattgttcgagcaatcgctaaccgttggcgttgaccaccagaaaagttactcccgttttgctcaacaactgcgtccaatccgccttcttcacggacaaaatctgctgcttgcgcaatttcaagtgcatgccacatttctttattcgttgcttcctcatacccaaattgaaggttagaccgaatagtcccactaaaaagaactgcttgctgttgagtaatagaaataacctcatgcagattatgctgacttaactttttaactgggacaccatcaactttaatctccccgctttcaatatcaaataaccgcggaattaagttaaccaaagctgatttacctgaaccagtccctccaataatcgctaaagtctgacccgctgtaactttaaagtttaagtcatgcaaagctagtctttctgccccatggaaacgaaaatcaacatttttaaattcaagggaagctggttgattaatcgaaatcttttcttgatccttttccggtgcattatgaatactgattggctggtccaagacagcattaacacgggtagcagatgccgatgctcggggaacaaagacaaagatcattgaaagcatcataaagctaatcataatctgagtggcatatgtcataaaggcaattaaatcccctacttgcatgctcatattagctacaagatgaccacccagtagaataatggcaacatttgtcattcctaaaataagcgttaccactgggaatagtgtcgaaacaattgtaaaggccttgattccggtttgcgtgtagtcctcgtttgcttttttgaagcgattttgttcccaatcttcctgccgaaaagcacgaataactcgaactcctgttagcccttcccgaaagattaagttaatgcgatcagtttttttctgaatgctcttgaataacggaaccgcaaagtacataactgccatgacgataatcgctaaaactggcaaactaataaaaaacactttagttagttgcggttctcgaacatacgctaaaacacaggctgcaacaagcattacgggtgattgaagcatcatccgaagcatttgcaccatgacattttgaatctgcacaatatcattggttgaccgcgtaattaaagatgaatcgccaaactcatccatttcgcgattcgagaaacgtaaaaccttatgatagatctggcttcgtagcttttcacccaccttcattgattgggtcgccgcaaaataaacatttaatccggcggccactaatccaatcgcagccacaattatcattttaattccttcattccaaattacgcccatatctttttgcacaattccccgattaacaagatcggcggtaactgtcggcaaatataggtcacacgaaacttggattaataaaaagaaaactgcaccaattgttgcccaaaaggctaaattttttcgtgctatccgtatcattgctattcctcttcactttatcgtcaaattttataattgtttggtatctaacttttatatattactctatttaattaaaattgcaattaacctaaatttcaagaataagttagccactggactcaaataaataatactgaccaattgattattggttgatggagctgtgatatctcttggtagaaggccttacgatagatatccattgacgaatgtccattaaacatagctcgtggatagtgattcatccaatcattagtcgctatgatctgagcactactatagttatttatagcttcacctttggtaatctccttgcggagaaaccggttattgatctcattggatccacgttcccaaggggaatacggatcagcatagaaaacatgatcgtgaacttgtgttaactcactaaattctgaaccgttgtcagaggttattgtcttaaagatgcgatagtaagcatctgtgcccattttctggcgtaaatttataaagaactgatttactgcatgcgcagttttaccagcaattttactcgtgatattaactcgtgaaaggcgatcagtcattactagtacaacactgtcattaccgtttttctgtccctgaactgtatctagttcccaatggccaatttcagaccgttggtccgcagtttgaggtcgttgagcaatattaggccctaagcaccttttagcttgcggatgagttcgatgatgcttacgtttaggtttttcaaagaggtctaaattggacgtacgaagcacaccctcattaatctattgatataaagttacaaccgactttgggatcagggtgccatcattcattaaatctcgagccttataaataaccgcttgtggggagtaatggtggtcgtcaaactcaccaagcattagctgatcagctaatcgtaaaaattgctttgaagaataatataagcgacgacgaccagaatggcggtgatgttcaagatatgtggcctgaccagcttcataactatagatgtagtaagaatattcgtaaatcttaccattagatttttgacgacgaagttggcggaccgtaccacggttgagctcgttattaattgtttgatgattaactcctaattggcgaccaattgcgcgattggaaagtccttgcgactttaaagtcgcaatcatcacacgttcttctttagtaagatgagcattctttttatgagtagtcaataaactagtagacatggtatcatttaagtgcgtcatttgacggacatcctttcatataggtttggttcacttaatatgatacctgatgtcacgccgaatggcgttttttatttaccaccaactgggtggctaacttcattctataatccaccaaattgcaattaaaagctttatcacatgctttatttaaaaataataaatttttgttttaaccatattaaaataaaaattttaggctaaaatataagaaggaacatgaagtaaaaagctccagtctgtttatttttaagaaacgaggtttgatattatggctgaaacagatgttaacccagaattagttaaaaaaatcgttaaacaagtattggctcaatctgctaatggaggagatagcaccaaaaaaatttttgcttttagtatccgaaaagatgaagaaccttacgttaaagaatgggctaagaaccatcccgaaatagaagtagaatatacggatgaactcttaactcctgaaactgctgcaaaagctaaaggagctgacggggtagttgtttaccaacaactcgattacacgccagaaacgctacaagcactggctgacgaaggcattacaaagatgtcgctacgtaatgttggtgttgataacattgatatggctaaggcaaaagaacttggctttgaaattaccaatgttcctgtttactcaccaaacgcaattgccgaacatgctgctattcaaacagctcgaattcttcgccaaaccaaggtcttagatgaaaagattgctaatggcgatttacgctgggccccaacaattggtcgagaagtgcgtgaccaaactgttggtgttatcggaactggtcatattgggcgtgtttatatgcaaattatggaaggcttcggtgctaaggtaattgcatatgacccatttgaaaatccagaattaaagaagcaaggatattacgttgacagccttgatgatctatatgctcaagctgatgtgatttctcttcatgtcccggctactaaagaaaacttccatatgattgataaagatgcaatcgctaaaatgaaagataatgttgtaattgttaattgttcacgaggcgcattagttgatactgatgctgtgattgaaggacttgatagtggaaagatctttggctttatcatggatacctacgaagatgaagttggtatctttaacgaagattggcgtggcaaggacttccctgacaagcggcttaaaggtctaattgatcgttcaaatgttcttgttactccacatacagccttctatactactcatgctgtccgcaacatggttcttaatgcctttgacaataaccttaaattaattaatggtgaagaagctgacacaccggttaaagttggctaataattattaatctttcttaaaaagcccgactattagtgcaagactaataatcgagctttttttgttcactaaactagtgccgtttgtaaagcacacgcaagaaggcccccaacaattgggccacacattggaacccatgcataccaccattctgaaacacccttattaggaattggcaaaatagtatatgctaaccgtggtgaccaatcacgagctgggtttaaggcaaagccagtagttgtcccgagacatgtaccaacaactgcaataaccattcctacgataaatggcttcaatccctgtgtaaagttaccaagatttaataagatgaaaataaatgcaaaggtcgcaatcacttctgagaaaaagttaaaaattggactatttatcgctggacgagtagcaaaaataccaacattatttccttcttcttcatttggggttgctttaaattgtggatagaattgaataattactaatactgcaccaacaaacgcaccaagaaattgaccaagtaagtaaggtataacgttactccatgggaataagccaaaaatagcaaaaggaattgttacagcaggatttaagtgccctaatgagcccagaaatcctgcaacataaactcccatcgtaactgctaagccccatgaaatacagataaaccaccagccactttgtttcccataagttttatttaaactattaccagcacaacatcctgctcctaataagatcaaaaccatggtgccaaaaaattcgccaataaatccatgcatgtctaaacaccaacctttttaatttttcttcaaaataaaacctaacatcaagagaataatcaccaagaaaatcccacagtaaatatatctttgcggatgtccttttacgtgtccgtaccgataatcattattataacgttgcatggctcctattattaatccactgattccatttattgttggactaagcgcaaaggacgccgacacttcgcttatttcattattaataaagctaaaaataataaaaaggactccaatcatcaccgttgaaattatcgttgcaagattaattccaactaacatttcatagataatactgttattagctggaaccttaacaagtattcttggcatctcttgccaacttcttgcaataaagaagatgagtaaaaagcaattaccaataataaacggtaaagtccaaccattatgtaattctaaacttggcggaattacaatccctgcagcgcatagaactactattggccaatacatcgaagcaaattttcgacgtgattgcggtcgttccaggagagcaaaaaattgtcccaaaagagcttgtaagaaatttaaaacgataaatatcatgacccatatatttaagtagctaggaattaatactactttaggctgtccccaggccaatacaatcgaaataattaaaacaatagctaacaacaaagcccttggtgcataaggggacagatttcgatatttttctgctcgttgataaattaatatcaggttatacatattcatcactaaaatgacagctgaaaccagtaaagtagagtcctgcaactgatttggggatgggggttctccacctaaaataatatatgctgacattgtacaaagccatcccactgtccacatcaatggaatagttggtgtcaagattaatggctgacgcggcaaccattgttccatgtgaaacacctcctcaatatggtatcttaccataagaaattgctcaaaatctggtaagataaatagtagttagttttaggaggtaaatttttatgtttttaccacaattaggattaaaaggaagcagtcaactagaccaaattgaggatcgcttacagtataatcctactatttatgaattttatactaatgctgatgactttactgatgaaggctaccaacgcctctatgatgctattcaatacgttaaagatgctggaattaaaaatattattctacatcacccaatgaagtttcaggatcatcattcagaagtagtggcccctgaaaaacagtatcctgacctatatcgctttatcgaatttacaactgaaaagctcctttatttagctgatgatcttgatgttcaagttttggttcatggtggttatgctggtcctgagtcacgttactttgtttcactctaccctagtgtagaagacgcccgaaatgctgtttatcagcggttggatcgttttgcagatgctggtggagagcatatcatgtttgaaaactcaattgcgccagtttttgcttatggcgatccccttcaagaagatgaaattcttgcacatgattatcgacttgcctttgatacatcccattgttttattgaacttcatgggaataatcagaaattggccgtatccctagcgcatttaaaagatcgtaccgttcattaccacctagttgattcaatgggcgaaactcatgatagtcttactctcggcaccggtaaaattgactgggctaacgttttgcctcacttaaatccagctgctactagtatttatgaaattaacttacacgatcaaaataattgtcgtgaacaaattgacagtcataattatttagttaaactttaccaaaagcttaataatagaggagtttaatcgtgaagcaatatattaatcaccgtcatatttctttagtattagccctatttatcctctacttagcaatcacttactgggaagttgttgctaaatttatccaaacaattttttcggcaaccatgcctcttttaataggaggaatagtcgcctatatcgttaacctattattaagacagtatgaatacctttactcgcatttatttaagaagccaagtttgcaaaaattcaagcggccagttggaataataatgtcctacttaacaatcctcctaataatcaccatcgtctttgctctggtaattcccgaacttattacgtgtgtaaaactacttattgcaaatcatagtcacattatcaaccattttattgattactttgaacatagcagtgattttaagggcttcatcaatagctttgataccagtaaaattcaatgggataaaattggtaaataccttacatctggtgttggtggaactttccggacggttatttcaacagcctcgtctgtattttcagttgccacaaccgcaattattgcgtttttcttttcaatctacctcttgatttataaagagatgttgcaacgtcaatttactaaattactttcaacatactttagccgataccagacacaaataattaaagttctgaaagtttttgatgaaagttacagtaactatattgttgggcaatgtaaagatgccgctattcttggaatctcgtgttttattgggatgacgatcttacgaatgccatatgcttcaatgatcggagttgtaactgcatttggtgcattaattccaatcattggggcaatccttggagcgagtgtcggagtaattatcattttcgccgtttctccacttcaagccggtattttcttgatctttattattcttcttcaacagttagataaccgcattacctatccactagttgttggaagatcaattggtctcccaagtgtatgggtatttgctgcagttattattggtggaggaatttccggaattcttggaatgatgttcactgttcctttatttgcagccctttataaattgttaagtgctgatgcaagaaacagaataacaattcaaaaaatgagtgaaaaaccgtagcatttttcactcatttttttataagttatctggaacatcagcagcaggttggtccttagttagtcgataaacttgcgatgtatttacaccaaagtactggttaattaacttactcaattcttccatcgcttcattagcgcgttcaatttgttctggattaattgcttccataaccgcaactacattttgagaatcttctgtcaacattgttcgttgagcttcacgccaatttagacaacgacaaacagcaccttcatcgtcataataaataacttcccccgccaaagcaggttcatcttcttcagcaccgactggccgaaatgcttcgccaccttttgcaacaccaagatgaaggttgccagcaatcttatttcgatcttcaatgcccactggaacaccgtagcttaaagaaatactattgtagacatccacaagaggttcaattggttcaaatttccgtccttgattggcacgcttcaataaggcctcaattgatgagcgcgcacctttctttttcttaaattgttgaaatgcttgacgccattgatcaacaactggattcaaacgaaaagtctcattggttagaaacttatcagcctcatgagtagcatttgctaatagtttctttcgttcatcatagttgtcatcagtatcatggttatcaatgccatttgcaaacaagatatttacctgtgcatctggaaaaagttcccaaaaacttggatcaatcgtcacttgcttcataaaaataatctcctctttataaattaatattgacgtttgcccccatgctttacggtatcccaatcgccatcaatattttggcggatacgaactagatagtcatgaacctgctgagcctctttttccgagaagcctttcaatgcctcactatttgaaaattggttttcacgaataataaaaggataaatctcttttcctttttgagtaacataaagtcgtttaattttcttattcgttggatcactttttctttcaataaagccatttttttcaagcttttttacagcacgggcaatcgttgttcggtctacttttatcaagtttgataattgttctgaaataattcctggatgctcataaatacgaacaacatacaggtattgaccacgtgctaagtcgatttgcttgaactcaatattggcaatcgaatcgagtgctcgatcaatcatccctatttcacgtaaaatatcaatcattgataaaaattctccttaactacaatattaagttctttttgttgtaattgcaacaaaataattagctttaattattttccaacggcgcaggctgagcgactttttgcatggctgttaataattgagctgcatccattcgcgataaaactgatttcagtgctaatgtcattaagcgatcattttgtgtattaatcacattattacttggaatttcttctccagctaaaagtgcattcaaaatttcaacaaagcggtcataggcagcttgcgggtaagaattcatagtaacctgagcaattcctgcacgaatatcatccagtgaaaaattcgattttaacaatccaataagcaaaagatctactaattggttaacggcatactttttcttaatcggtgcttgaataactttctttttcacataattatttaccattgattttgtaagtggctcaattcctaaatgatttaattgttcatttacaatcgccaccacctggtcaacatataaacctagtgtaggtaattctttccatcgtggaaaccgcacccgtgctaaattattttgccatcgttgatattcttctaatttatccatatcacaacctgctttcttatggtgcaattccaatcgattgattccgaaaatcatcggtagtaactgcctgttcaattatctgtgctacttgtcctaatccaatctctttaccttctaaaggattgccttcactaacaaccttaagtgaagtttcttcattagtaattggcaaagctctaataatagtatagggcaactcaaattcatcaatcattttaaccgcatattgatgagcaaggacagtctgagttgcctgttgcccataccattcctgtagttgctgatttgtcgcatcatctgctgttcctgcaatcgaaagcattactatttttgacggtaaaaacagtgagtgatcaatcaattcggctaactcttggacttcatcatctacatactcattaacagtgggaagccaacataatatatccccacgctgaatttcaaatttaaaactagtaagagcaactgcttctggaacccttttgataatagttggtactaaatcgtcatgccggtgactaataaaaactatccgacccatcacaacctccaaatctattagtaagccatcaattcatcttcaatcgttgcatcttcaattctgacatcagtaatggtgctttgctctagtaatggcagtaatgtttgaatatttccagtgaaaaggaaacgggtctcattacctgcttcttccaacatgtgtgcccctaactttactgcattgtcgattgggaaaccagttcccattactgtcacagtacaatctactccatcattcatcgacaaatcacgtgcagaagtcaaatgactgccattaaagtaataaagagtatgagcaaaccgcatcaatgttgaaatatttttgcttgtgaaaagcactaaggcatcgaccttttgagcatagtctttaacaaggtgaccaatcatttgccgtttattttcctctaagccatcaaaggcatcattcaaaattacgattggacattgccaagcaaggagaagtgctatccgcagttctagtcgttgtgcctcgtttaatgaagcaatcatttgatcaggttcaaatttcaatgatttaagcatttggagtgcttgttttgacttcaaagcatttttacgatgacgtaatgcgtggtcaacagcttttgccactgtctttccttttaaaaccacatcatcaattcggccgatttcatttttgctttggcgcttatattttttgaatggaaccccgttaattgttacatccccatttaagatttttccacgaacagataataaatcttctaatgcagttgctgcgcctgtatcgttactgcaaattccgactacttgtggtgactttagttctaatgaaacgttatctaattgatctcctgatttagcatcatagactaaatcattaattgtaatactgctcactatataacctcttttcttaagctatctacctttactaatcttatcattttttaggtaatgaacgaaataaacatgtctttctttttaatatgctttaatttataacgacttatttgaatggtaaaataatatacataaattgtacttatcaatcgaaatgaggaatgttattttgaatgagggccaactattcactaattttgtaattataatcattacatttatctttgcggcattttttgtggcagccgaatttgctttagtgcaagcacgggtaacagccctagaagaaatgcaagcaaagcgcgataaaccatctaccaaaataaaccgcgcaatcaaaatggtcaccaatctaacagaatacctttcgaccactcaagtaggagtttcaatttgtggaattattctcggttgggtcggtgaaggaacgattgaagcactcttagctgatgcactttcgttaccaagctggtcactaaacaatagtgtcatccatgttgtaagtgccattgtgggagttcttcttctaacatatttcgaagtagttttaacagagattgtacccaaaaacatcagtattgatattccaattaagaccctgatgttcgttaccaccccactgcactattttcacattactttttatcctttcgtttggttgcttaatagttctgccaacggaattgttaaaatgttaggcatgaagccagctgacgagagccaagacgtcctttcgcaaagtgagattattagcctatctcgaaacgctgttaaaggcggtgaacttgagcacaatgacttgctatatatggaacgagcctttgactttaacgataaggttgctaaagatattatgatcgatcgtactcaattaacagttattgatataaataaaaccgtaaatgacgcgattaaactatatcttaagacgaaatatagccgcttaccggtagttgctgataatgataaggataagattttaggttatgtttttaactacgacctaattcggcaaaagcaaatcaacggagatgtatctttagcaaaagttcttcgccatatgcctactactcctgagactacctcaattaccgaagtccttaagttaatgattagtactcgggtgcccatggtagtcgttgttgatgagtatgggggtactagcggaattattactgacaaggacatttatgaagaactatttggaacagtaagagacgagatcgacaaggtttcagataacatgatttctaaaattgatgaaaatcaataccggattgatggaaaaacgaccatttatgattttgaacgcttcttccatgttgaacttaaagattctgaagatagcgatgtagtaactttatcaggatatgtgttagataattatcataatattcatgaaggagaaacgatcaaactagccaaccttgagttaaaaattcaagattatcgtcattcatatattgatagttttattgttaccactttatcaaagtaaaattttacattttggcagcaataagaaaattatccttttatttaacacttaattctactaaaataattttgtaatattaaagtaaatctaaactagaaggaagaaattcacatggcaccaatgaatattatttatatctcgcttgagggaaatacccgttccttcttaacgcggatgcagggatatgctaaacaacagcacagtattagtgaagattgtccacttattgaattaaaagaagttagcgatcaaacgcttcctgccgatgaaacagaacccttctttgccttcgtacccacatatttaaatggtggtaacggaatcgattctggtttcactgaaattatgacaaatgcattaggtgaatatatttcctacaacgataacgctaaaaaatgtgtcggctttgtaggtagtggtaataagaattttaacgaacaatattgcttaactgctcgtaaatacgcgcgagactttgacgcaccatttctcgcagactatgaattacgaggcacttcacaagatattgagcgaatttatactatcttagctaaacggtggagcgaagttaacgcctaacttctaaaataaaagcgacttggaaatccaagtcgcttttatttttagccttgtttattagcacttatcagccatgttatcccatacttatctacaatctgccccattacattatttaggatccaatcaccaaatggtaccgtcacacgttgattgtctgattttgctaaacgattaaacaaatcacgtgctttatcttcctcttcttcaaaatcgagtaaaattgaaattagtgtagacgtttggggattgcccatcgttgcatctgcacaaataatcttttgtccagcaatcataaattcaccacgcattgttgtctggttcaattgatcaactggtaatccaagactttccgcctgctcttttgtcagagactcgtgatatgtaatctgagcgccaaagtcttgttcataataagccattgcttccttcgcattctcaaatgttaggtatgggtatatagccgtcatagtgttcctccaaaaatattcattgttgattatatattttgaatcgctttccgtcaaactagcttccaattggattagctacttctaaccgtatattaatcataactaaggccccattatgatataattgtctagtctattatcaagctaattttaagatggaaggatgaattttttgaaaaaactcaaaaagcatagtccgcttctaatccttggattattcttccttgggatctgtatgcggatgccgattacagcaataccgtctgtcattaaagatattgcacaaacttttaatgtagaaactactagcttaggaattttaaccactattcccctcctttgttttggattattatcatcagtagtttcagcactcgctcaaaaaattggtaatgaactaacgattgaattagcaatgattttaatgtttattggttcttacctacgaattttaaatttctcctcgttaatgatcggaacaatattagtcggggctgccatcacttgtattaacgtcttattacctgcgattatttctgacaaacttcctaatcaaattggaagtgtgaccgggatgtataatgtcgcgatgactttatttgctgcaattggtgcttacgcaattactccaatcacccatgctactagttggcaaaccgctgttatcattattagtattgttgctttaattgcagcaattatctgggtaccaaacttacgctataatcaacgtgccactaaagaaagcagttctactgagcgtggaactaacatgtggaaaaatgcaaatgcatggtggttactcttattcttcgggggacaatgtttcgtattctatagtatcgttgcctggttacctacaattgccatggacgctggattaagcagtgataatgcaagtttagttgctggattactacagctattatcaatgccattcgcctttgtaatcccagtgattgccactaagatgaaaaatcggcaaccaattatgctatttgcaggaatcatttctttaattggaactggaatgatgttcttccctgtaaattctcttgtttactatatatttgttgccctatttcttggtgccggtacaactactactttcgttcttgcaatgaccttgttcggactaaagactaagagttctgccgatacccgaaacctttctggaatggtccaatcagtaggatacttaatttctgcattaggtcctatcgttgttggaaacctttattcacaaacacataattggtttgcaagtttaatcgtgattgctattgcagctatcttcttcacagtctgtggtgtaatagcagaacgtaaacaatttgtttaagatatctttcaaagctgcggaatttttcccagcttttttagttagttttgttttcataagctataattttaaccgattccaaatttcttttaaaagtttttttgatctagaccattaattgataaacgcttaccaaagactaatcaacaagccatttagcggtagtggtccattttaactttctaagacatcttctcagaaaacgtttcctttgatagtgcagattgtgctttaagagtatataattgtcacggtataagaattttctgaaatttcagaaggagtgaacattttggctacagaaaataaggctgtcattacattatttggtgcgactggtgaccttgcaaagcgtaaactttatactgctttgttcaagttatatcaaaagggttacctagctgaccattttgcattactaggaacctcccgtcgtccattgactgacgaagaattccaacaaatcgttcgtgaatctattagcaatattccagaaactgaggatggccaagcagaagcattctcaaaacactttttctacaagtcacatgatgttactaaaccagaacattacgaaatccttaagcaacgccttgccgaattagatgaacaatttggcgctgaaggcaaccgtctcttctacatgtcaatggcaccacaattcttcggtactattgcattgaacttgaagaagcaaggattattaactgacaatggctttaaccgtcttgttattgaaaagccatttggtcgtgactttgaatctgctaagaagcttaacgatgaattatcacaaacatttagtgaaaatcaaattttccggattgaccactaccttggtaaggaaatggttcaaaacattcaagcattacgttttggtaacaccatgattgaatcactctggaataatcgttacattgataacatccaagtaactttaagtgaaaagcttggtgttgaagaacgtgccggttactatgaccaatctggtgcattacgtgatatggtgcaaaaccacatcatgcaaatcgttgctcaattagcaatggaacaaccagttgcatttactgatgctgatgttcgagttgaaaaaattaaggctcttcgtagtcttcgcctctacacaccatcagaagcagctgctaactttgtccgtggacaatatgatgctggagaaggaactaacgcttaccgtcatgaagatggtgttgatccagaatctggtactgaaacctttgttgctgctaagttaatgtttgataactatcgttggtctggtgtaccattctacgttcggactggtaagaagttagcagacaagtttactcgtattgatgttgtcttcaagaagccattaatcgatatctttgctaacccacgttctgaaagtgaccaatcccttaactcaaacgtattaactatttttgttgaacctaactcaggttttgcaatccaattaaatgctaagcgcgcaggtcaaggcttcacaacagaacctgttgatttacgcttcttgcaaagtgattctgataagaaggaatctccagaaccatatgaacgtcttttccatgatgcacttgaaggtgaccacacaaactttgcctcatgggctgaaattgcttatgcatggaagttcgtcgatgttatccgtaagctttgggatattgaaaagcctcaattccctaactacactcctggttccatgggtccagcagcttctgacgaactcttggctcgtgatggacgtaagtgggtttatcgtttaaatcattagttaataaaagtaatttatagcattcttgctgtaaattatttttttataataaaaattgatatttagcgtttgcactatctttaatttttgttataatcgaggttgtgaattatattacataagtattgaggagagtgactttaatgtctgatcaaaaagcacaaattggtgttgttggtttagctgttatgggtaagaaccttgcactaaacatcgaaagtcgtggcttcacggttggtgtatacaaccgtcaccgtaaccgtactgacgatatgatgcgtgaccacagcgataagaagttagtacctagctacactgttaaggaattcgtagactcactagaaaagcctcgtcggattcttatgatggttaaggccggtaagccaactgatgctcttatcgacgaattattgccattacttgacaagggtgatgttttaatcgatggtggtaacactaacttccacgatactatggctcgtaacgctaagttagacaagtctggtatcaacttcatcggaatgggtgtttccggtggtgaattaggtgcccttcacggtccttcacttatgccaggtggtcaaaaagaagcttatgacttagttgctccaatccttactaagattgctgctaaggctgaagaagatggcaagccatgtgttgcttacattggaccaaatggtgctggtcactatgttaagatggttcacaacggtatcgaatacggtgatgaagaattaatcgacgaaagttacaacatcatgcgtaacgtattaaagatgcctgttgatgacattgctaagacctttgctgaatggaacaagggtgaattaagcagttaccttgttgatattactgctgatatccttactcgtaaggatgaccttggtgacgacaagaacaagcctattgttgacatgatccttgaccgtggtgctaacaagggtactggtaagtggagttcaatgactgcccttgatggtggtgctcctcaatcagttattacagaagctgtttacgctcgttacatttcaatgatgaaggacgaacgtgtacaagcaagcaaggaattgcctgttgaaactgaagctatttcaatcgacgacaagaaggaaatgattgaaaaggtacgtcaagctctttacttcggtaagcttatgagttacgcacaaggtttcgaacaaatgcggatcgactccgaacgttacgactggaaccttaagtatggtgaattggctcaaatttggcgtgcaggatgcattattcgtgcacaattcttacaaaacattactgatgccttcactaagaacccagacttgaagaacttgcttcttgatgattacttcaaggatattgctaagaagtaccaaaaggcaactcgtgacgttgttactcttgctgttaaggctggtattcctgttccttcacttagtgctgctatcagttactacgactcataccgttcagaagtgcttcctgctaacttgcttcaagctcaacgtgattacttcggtgctcacacttacgaacgtactgaccgtcctggtaacttccactacagctggtacgaagaacaataatcaaataaattttgatttaacgactgagatctattctcggtcgttttttattttaaatttcttaacaagaaaatagaaacgtggtttgattagcatagaggtgagtataatgaataaaacatttatgagcggctattaccaaggtgtcatcgaaacagcccctactactctttcggctgctaaaacagaacagttagcaattacgatgacaatcctccatttacgtcatgctggaataaacattacatcaatccatgattttcttgtcaacgatcttcatgcaaatgaacgccttgtaaataagtatattaatttaaatgctgatgggttagaaactattcaggcccaagttatagcaatcgctttcaaccaataattattttgatattacttcctttttcgtaaaactttactaaaattgcattgactttttctatgaaaacgcttaccattattcgtgtaagatattattatatgttgttgtagaaaaggggagttaacatgaatacaaaaatcgatactgcaaaaagtaaacagcatgttgcccgttcccgttttgcctattcaatgggagccttcgggcatgatgtcttttatgctttactttcaacgtatttcattatgtatgttactggacacttattcaattctagtaacaaagcattcaacaatcacatggttctatgggttacatcaattatcgctgtattacgaattgtggagttgttagttgacccattaattggaaacgcaattgatcgtactaacacacgttggggtaaatttaagccgtgggttgtcggtggtggaatcatttcagcaattattttagccatcttattcaccccaatgggcggtttaagtctttctaatccttacctatacctattgatctttgctattttatatatcattatggatatcttctattcatttaatgatgttgccttttggtcaatgattcctgcgctatcatttgattcacatgaacgtgataaaatagctacttttgcgcgggttggttctactgttggaggaaatattgttggttttgttattatgccaatggttttattcttctcagcaaatcaaaatggcggtaccggtgatgatcgtggttggtttatttttgctgcaattgccgctgctgttgctgctattactgctgttggtgtcgggcttggtactcatgaagaaaagtcattgcttcgtgaaaacaaagaacaaactaaactaaaagacgtttataaaattcttgtcaaaaatgaccaattattcgctatagctctctcatatctattctatacaacaggaatcacattagttaacagtatggagctttactactttacttatattttaggtgattcaaaggctttctctattctaggtggattaaacactgttattggtgttatttcagttcttactttccctctctttactggtaaaattagtcggcgtaaattattttacgggtcagtttcagtacttttccttggcttattaatctttgcatttgctggtaaatcactcattttagttttagttggtgcagaattattcttcattccacaaccattagtatttttagttgttttaatgactattactgattctgttgaatatggtcaattaaaattaggacaccgtgacgaatcacttacattatcagttcgtccactgctagataagttcgctggtgctgtttctggatggattattggaccaactactattattgctggaatgactgctggtgccactgcagcaacagttactgctgcaggtgctgctaagtttaagctagtaatgttcctagcccctgctatcttgatcctcattagtgtatttatctttgcaaaaaaggttaaacttgatgaaaagatgcacgccaagatcgttgctgaacttgaaaagacttggggagatcaccttgaagatgctgacagcgacaaccctcaaacagtatctgtttctaccccacaacctggcgttactgatattacatcaccagttgccggtacacttgttaacttaaaagacgttaacgatgaaaactttgcttctgggaacatgggtaaaggattcgctataaaaccatctgatggtaaagtaattgctccatttagcggaacagtacgagcaactttctctactcgtcacgcaatcgggcttgaatctgacaatggtattatgttactgatccacgttggtattgatactgttaagcttcgtggtactggattcattagttactttgataaggatcaacactttaacaaaggtgacgaattaatggaattctgggacccggcaatcaagaaagctggccttgatgatactgtcatggtaacagttactaacagtaaagacttcgatattaaattattgaaagatgctggtgaaaaggtaactactattgatatcgtcatggaagttactaaaaagtaattaaatatcttctctgttaaaaaagaggctggaaaaataatccaacctctttaccattttaaagtataaactgccagaacgcagtagctggctggattctgaacgttgataaatcaacgtccagaacacctagccatccttgcgggggggtgggactaaactcgcaagcgagtttagtcccactcctttttaatctacatattttattctaaatcttgttaatgttacggcattaatcaacgttacagcagtcataataataaccacaggcgtaaacgctgaataaaaccaggaaattccaaaaccggcaattgttgaaacattgaactactcccacttagctaaacctacggtttaatgcttgaagtgggagattctggaaacatcgcatacttaccctaccgattctgaacgaaccttcaagcagaggttacgactattagccaaggctcgtcccgagcctaactttatctatcggatagctaatcctttttgcaagatgacttgtgcagcgttaatatcacgatctaaatgtttaccacagtttggacaatcccactcacgtaccgctaaccattccgatttattcaatcctaaccgatgattattcttcccacaattagcacaaatttggctagtatatgacggattgacctgaataagctttttaccgtaccagtcacacttatattgcaacatatctactaattttgaccagctagcgttagcgattgctctagctaaatggtgattcttcatcattcccttagtattaagtttttccaacacaatgatgtcgtactttttgaccaatttagtagtgaatttttgtagctgatccaaccgttggttggcaatcttttgtcgatacttcgccaccataatacgagctttctgataattcttaaaatcatctaattgtcgtggaactaacactttattatgatgatcccaggcgatttcctgctgagcctttaagaaccgacgactacgtaatttctcccaacgatacaactttttatggtatttgtcttcaaaatgattgatcggttccttgcatccatctgaaagattaagtaatgacttaagtcctaaatcgccaccaatatatttacttgttttaggaagagtttggttttcgctttccactaaaacaataatgtaatattgaccagcaacgttcagacgaacagtgacattcttaattttacccattggcaatcgaccagctctaaaatagacgataccgagttttggtaactttatatgatggcaatctaaaactttaatattgccattaacgtactttgaattgtagctctgagaatattttttggatttaaattgagggaatttattttgacctttaaaaaagcgttgaaaagcatcggctaaattgcgattagcactttgcaaagcagttgattctgcttgtttcaaccaaggatactcaaccttaagttgtttcaacagattattcatcccaaaggcattcacaaatttagcttccggattattcttgcgccgttcaatttgcatattaagcatttgattccatacaaaacgaacacaaccgaaggtttgccagagctgatttcgttgtgctgaatttggatagatgcgcattttaacggcttttagaaccattattttctcccttgactttcaatatatcgttttacaacttctaaaggcgctccaccagtgctaattaagcaatagctttgtgtccaaaaggctgatttccaaagatattgcttgatttctggaaattgttttttgaccattctggagctagacgatttgtaagcatttaaaaatttagccatttccgtatgaggcgttgctctaaacaaaacatgtacgtggtcctgatcataattccattcttgcaaattgatgccgtacgcttgtcccacaactacaaaacgatgtttaagatattcagatatttcatcgttaattacttttcgacgatacttaaccaccattaccaaatgataattaagtaagtatactgaatgctgatttctatctaattctattgttatcaccccattttatagatatatactaaatatatcatagaacaaaagaaaaagcactaacgtactttaagagagcgattcatcccctacttatagaagtggggtattctcgcaaatttatggataaaaatacttacaacggttttatttacttttaccttattgtaatagttagcaattgcaaggccaatataaagcaaggcaaaacccaggtacatgcaggttcccgcaaatcgcggatgtgcctctgcatcatcaatgaatttcattgccacagttattaggctaagaccaaataaaataaagtaatgaagatagatcattaaatttcctgtctcatggcgttgatgttcattaattaaatgatcaaattcaacaatgtaggtaaagaatagcgctgcaactgtggtaagtataagaatagactgaattgaaaagctggtggcagtaaagtaatcagcaataccgacaatcgtctcaccaaacatcacgataattaatgccgtaagccgttctagcaagtgcgaaaagatgataggatgatgctttgtatattttccggtaaagccaggcgcaatccaactgataataataccagcaaaagcaatcctcactctaactcggctttgataaaaaatcccaccaataaaaagcgtaacggtcctaaaaattaaaattccagcaaatgctcgtgtaatctgtttatctatcttcttttctgcctaaaagtaaactaaaacatattggatacataacgttaatgatagcaatcctgcagctatgaaaaaaattgctaaatgccagtcaaatgttgttgaaaacgaatttgacatatagagaagaattgccatatcgacgaacgaaaagataacatttgttcctgaaatctttccatgccgatttgtaaaaaccatctggaccatccaggaattaataaatacaatcacgacaattgcaaagattcctaaaaccggcaatcccacaatcccattgtgcaaatggtgaatcatttctgttgctcggaaaaccatgtaaacgaacactaaatcgtaaaataattctatcaaggaaactcgcttagtaatttcatctgccacgataacacactttcttttttataaaaaaagagttaatggtaatatttaccactaaccctcattgataatattcaatgactatttaacctgatctacatcagttcggacaactaacacatcaacaggcgcattacgctttacatatgacgtaactgaacccattacagctcgttgcatccgtgataatccactagcaccaataataatcatgtcgttgtggtgatcacgagggaagtcaaatgaaataattgtctttggattaccaagacggatatgaatgtcaagattgtcaaaaccatccttatccttggcagtcttcaacaattcatcaaggtattgctttgacttatcaactaactggtaagcaatacttccatctgacataccagcaaagttataagccattgctcgtgtatcaattacgtttaaaatatctatatgggcaccattacgctttgcaattgcgattgcacgatgcaatgcaaattctgattcctgagagccatcaactggaactaggatgttttgatattcttgatccataggtttgaacctccaaacaaacaagtaatatatttacttaaattataccatttttttaaagaataaagcgaaggaaaccagaataatactgacctcagataaaattccaaatttcctaaaatttagactatacattaatctttaattagagtaatcttaatatatccaatatacctttaatatttgaaagtgaggccgcatcttatggacaagatcgataggaagattattaaccttcttcaaaaaaacgcccgtgcttctttaaaagaactctctaaagaatgttttatttcatcaccagcaattgcggcgcgaattaataaacttgaacgaaatgggattattactggctaccatacaagtgttaacatggaaaaaatcaactttcatgttaaagcttttattcaggtgcaacttgagcctcgccaaaaacaagaattttacccttacattcaacaaattcccaatgtgattgaatgtaactgtgtaactggtgattattcagaaattatggaagttgtttttccttctaccaccgatttagataacttcatcaataatattcaacaacgttttggaaagacaagtacacaaatcgtatttagtacaagcgttgaccaccgaggagttaagctagcaccagcccaagataccgttagttcagaaaaagagtaaacataaaagcgaaggtgaggatttccccatcttcgcttttatgtttatttaattttattcagcttcaacgtcagtttctgttgatggtttttcctttccgtaattatctaaatatgcattatatttttcacggtcaagagtaccttcagattcaccgataacaagtgtggcaattgaattaccaaccacgtttacggcagttcgtcccatatcaacgaaacgatcaattccggcaatgaaagtcaaaccagccattggaaccccaattgtagaaacactagcaagcaatacaacaaaagaagctcctggaaccccagccattcctttactagtaatcatcaaaacaaccagcagagtaatttggtgagaaatactaagatgaagtccatatgcttgtgctaagaagatcgctgctaatgattgataaattgcagatccatcaagattaaaagtataaccagttggaataacaaaagctgtaatacccttgcttactcccatctcgtgcgtctttttcatcaaacgaggcaacgtaacttctgaactggcagtagtaaatgccaaaacaatctcatcaaggatagcgcgcatcgtcttccaataacgtaaatgaaaaatatgagcagtaataccgaggacaacaataataaagattaacattgtcacatacgcaatcacaataaataatcctaatggcagcagagcactaatacccatttcggcgattgtcattccaattaaaccaaagaccccaattggtgcaaacttcataacccaattagtaactttgaacataacttctgaaactgcatttaatacatcaattaaaattttagccttttccccaacagctgcaattcctaatccgaaaagaactgagaacaggataacaggcatcatgtcaccatcagacatggatttaaaaatgttcgttggaataatcgacaaaattaatggccagaatccgctactatgttctgcagattttgcagtggacatgtattgcgaaatatcagttgcatgaagtttatgaatatcaataaacgaacctggatgggtaatgttagccattacgatccctaaaattaacgcaattgtggttaaaacttcaaaataaattaatgtttttccaccaatccgtcctaactttctaatatcaccaatattagcaattcccacagtcaagcaagaaacaacaattggcattacgatcatttgaatcagccggataaagattgtccctaagctctgcataacagtgatggcacccttattttgatagaaaattaatccacaaataataccaagggccagcccaatcataatttgccagcccatactgaggcgtccgaaacgatatcgcttcactttatatcaatctcccttatgtagtcttattatactttagcacatttttagtaagattttagcaatttttaagattttatttaattaaatccgaacactttttgctctttctaggtattttattcacttcaatataataattctaatttataattcgtaattttcactaaagaaaaataagaccgctactaagtatttctctaatatgatagagtgtttagagaatatttaattgaacaggagtaatttatgaacgcttggataacggaatttattaatcagtttggttattttgcaattgccttactaattgcccttgaaaatgtctttccaccgctaccatccgaaattatccttacaatgagcggattcatgacgaccaccacctctttatcaattgttggagtaattatcgccgcgacaattggctcacttatcggggcacttattttatatgctctcggccgccagttaactgttaaccgccttgaactccttcttagtcatcgtttatttaaacttctaggctttcatcaagatgatgctaaaaaagcagtcgattggtttaataaacatgggacaggcggcattctctatggccgctgcattcccgttatccgcagtttaatctctattcctgcagggatcgcgcaaacttcattaggaaaattttgccttctcactactatcgggagcaccatctggaacacactgcttgttgttcttggcgcttgggtcggccaatcatggaataaaattgtcattatcttcaacgattacacgactgttgctattatcattatggcgatcgttggtttatactttgcttatcggtggtatcaaaaaagaattaagaaataaaatgattcagtttcaattagtaaaagcaataacgccattactatcaaaactgaatcatttttcatatgctatcgggttgtttgccgtttgatcaagtgagttccgacaactgtcttgcatgggtcattattcggattttgcagccgtttaatcatcatatcaactgcggcatgtgccatttcatcagtggcaatgtgtactgctgacatacttggataaacgtacttaacgattgccgtatcgttaaaactaatcaaggcgattcgatttggaacgttaattttggcttcttgaatcgctttaagcgcgccaactgccatcggatcatttgctacaaagattccatgcggcatacggtcaccaagcgtcgcaattgcctttttcatcgcgttatatcctgacatcgaggtgtagtcgccagcaaatataaattctggatgataaaggttttgttgacgtaagttactttcaaaatagaatcgccgcaaatcaggaacaatttgttgatccgttgtcttttcagttcctgccaacataccaatatcgttaattccttcgctaacaaattctgaaataactgaccgcactgcattttcaaagtccggtactaagcaatcgtaaccggcagccaaactatcgtaatcaacaaacacaatattagaagttactaaccgcaatgcttgaacttgcgaatcactaaattttccaatcgcgatgatgcccgtaacatcacgaggaatctcttccatattgttttggtaaacgggaacagtctgtagtccctgttgttgcgctgctcgttcgattcccatccgaattgccatgtaatacaggtcatctaattcttgtgtaagagaataccattgaacaacagctactcgttgtacttggttattacgtgctcgcttatgcttagtatagttaaactcttcggcagtggctaacactcgctgacgtgtcttttcatttacagaaagtgtcacatcattatttaaaattcgcgatacagtcgcaatagatacccctgctttatccgcgatatcatgtaatgttactgccatactgcttcagcgcccctttcttcattttaggttaaaactattttaaagcatcaacgaatcgttgccaaccttcatttccagctgtgtcatccttaaagactcccgcattttccaaaacattggcaaagacattagcaagttcttgttccataacctcatcgacattatcctcggtgatattaatccttgactgaacttcttttgcccatagaagatgactatctgcaatcttattttcagcaccaagccaaaacttcttgacttcatttaactcatccttaagccgcgctggtaaaatagcacgacccatcacttcaatcaaaccgatattttcctttttaatgtgccatagcttttcatgtggatggaagattccgagtggatattcatcattagtattattatcccgcaaaactaaatcaagaacaaacttatcgccttcccgatgcataattggggtaacagtatgatgacgaagttcaccatcaaaagccttaatatcaagactttcatcactgtattgatcccataccttaataatatgtgtgccaagatcaattagttgctcagtatcggtactagttaaacgaatatcactcattggccagttaacgattcctgcattaacagctggatattcatcaaagtacaattctttcttaatagaggctttcatcattgggaaaatatgcttaccaccttggtagtgttcatgagcaagcattgatccaccaacgattggtaaatccgcattgcttccaacgaaataagctgggaattgcttttcaatttcaactaagttaattaaagtttgccgattaatctccattggctcatgcttactatcaaggaagatacagtgttcgtggaagtaagcatatggagaatactggaatccccattgttgcccccctactgtaattcgaataatacggtggttgcttcgtgctgcctgtccaagacgtcccttgtaaccctcattttccatgcaaagagcacattgtgggtacttcttagcggtatcatgagcagccgctgcaattgctttgggatccttttctggctttgaaagattgatggtaatttcaagattgccgtacttagttggtttatcaaagacaacattcttcttgatagcagctgctttaacatagtcgttgctagtacataagttatagaaccaatcagtcgcacttgatggagattgttggtacttttcccagaatttatgattaactactgatggcgttggggtcatcaaatcataaagctgatcgtttaaaatttccttagcagtttgaccatcatcaattttcccgcgtttaacagctaaatcaacaagttgactaacaacagattcatcatctttagcttcaacatcttcatcatcaacaaagccccgaatcttgtttaagacatagatccggtcgagtggttcataagttccactagcaatcacttggtcagcaaacttttccattaacttcattttctcattcccccactaaaatactattaaagcttatgtggtccatcaacaacttcagcatcatagaaactggcatcgtaaccaatcttgtcccggtagatctttccaacattctttttgaagttttctgcttctgacttcttaacaatggcaatcgcactgccggcaaatccaccgccgaccattcgagcaccaaggcagcctggttgaccccatgcattttctgctaaggtatcaagttctttaccagtcacttcataatcatatttaagtgatacatgagaggcattgatcagacggcctaattcttcaagatcgcccttttccattgcatcaatggctttctttgtccgttcattttcactaactgcatgacgggcacgacgaatcagcgtgtcatcatcaattaagtaggtgtattgatcaaatgtatcggagtctagttcaccaagtttgttaatattaagcttcttgttaagacgtttaactgcttcttcacattcttggacccgttcgttgtatttggaaccagctaaggagtggttcttattagtactcatgataatgatttcataatcgccaagttcaagtggcaaatacttatattcaagagtgttgcagtcaagataaattgcgttattttctttacccattccgacagcaaattggtccatgattccggaattaagaccaacgaaatcattttcagtcttttggccaagtttaactaattcaatttcatcaatatcaagattaaattcatccttcaagatatttcccatcaacatttcaattgatgctgatgatgataagcctgaaccataaggaagaaaaccgtggatgtataaattaaatccgtgatcaatcttgaagccccgttgctttagataaaccagcatccccttaaagtagttaacccacttttcatctttagcactttgcggttctgtatcattaatgtcaaaagtaataatcttactgtcttcttcttttgctgaattagctgagtaaatggcgactgttgtgtcctcacgcggtccatataccccataggtcccaatactgattgcacatggaaaaacatgaccaccattataatcagtatgttccccgatcacattaatccgtcctggtgagaaaaatacatccttccccggttccttaaatacatcttggtattcagctaaaaattgttgcttatccatcagaataacctccatacatcaaacaaacattagtaaacttttactaaatataatttactactttttaaccatctcgtcaataagcgcttacaaataattcaacacacctaagaaaacggttacaaaggataagggatgatatacataatttcttctttaatgctacactagtcataaataattggaggatttaaatgaagaactaccaaccaactgatctaattaaatttgcttcacgtactggacgctggaccgttaaaaagattaataatatgcccaccttatacaccactaaccttggaagctaccttcgttttaaggtttcaaatgctaaaaaatgtcaaattactgttttgccaaatcaaaattccctatctcctagccaagtgtttgcatttcgaattgatggcggaaagtggcaacgggcacaagctagcttagaaaaatttgatattccacttgattcgatattacataccatcgaaataatggcagccggtaattccgacattgacgaagtgtggaaaggtaatgaaggctttgcaattaaaaacatttatcttgataacggcgcaattatggcagccccgcagcgtcctgtggtcaactttatcggtgattcaattacggccggttgttgggtagttggcaatcatcctgctgctgactaccgaccagaaactaactatgcgggaatttgtgcagatctgcttaatgtcgatagtgttcgaatagcctactctgctgggggagtgttaagacctgctactggcggggtcccaactgccgatgtctttttaggaaaaattgacaatcagacattatggacgcctaatcaccctgatctcaacgtgattaatttaggcgttaatgaccgtcgtttccctctaactcaatttattgccgctttcgatctttttatccagcaagttaagctaacttttcctcatgctcccttagcaatcatgattccttttagtcagacctttgcttctgcgatccgcacaattgccactaaacataactgttcgataattgaaactaaaacttggcaccatagctttactgatgggctccatcctgaccaagcgggcgctattactgaaggaaaaatgcttgcacaagctttacaacctcttttatctcaattcagtgtacaatagtagtaagagttaatacgaggaggattctcatggctaaccaacgcttacttccaataaagaatgggtacaactttcgtgatcttggaggttatcccacagcagatggtcatcaaataaaatggcatcgtcttattcggactggttcacttgctcatttagatcaaaatgatctcaccgttttagataatattcctatttcgctcgatattgacctccgtgctcccgacgaagtaaagaaagatcctgatcgagtgccttcccaagcaaaatattatcatttacctgttttcgaagccgacgaaacagacgcctcgcatagtgatgaggaaatcgccgcacagatgcaacagccaggaaacggttatcaccatatgattgatgtttatcaccgaatgaccacggctgcttcagctaagcaggcttaccagaaattatttaatctcttattgaataatgaacgcggtgccttgctatttcattgtactgctggtaaagatcggacaggaatggctgcttatctcatcctcagtgcccttggcgttgagcaaaagattattatggaagattacctgctaacgaatactgttactcaggattttcgtaatcactggctgcaagatatgcggaatcatggagccagcgaggcactagtgacaaatcgggctgcccttgcctcagtagctcctgattacttaaatacagcaatcaaaaatattatccagacttatggaaatattaatcagtatctcaacaactaccttgatattactcctaccgaaataaaagatttacgaaaattgtatttagattaggctcgattataattgtcttataaggaggaatttttatgcaaatctcagtaccattagttaatgggatgttagcagatgaatatggtaaatatgcgccagcagctgatatgctagctgaccatccaattaagtcatttccaattaaaattaccgacgcaccagcagatacaaagacatttgcactcgtctttatcgattatgactcaacccctgtctgtggcttcacttggatccactggttagccgccaacattccagcaacgttaacagatatccctgcaaatgctagtcgagaattagcggataaatttgtgcaggggaataatagcaatgccggctcgttggttaatggaaacccattgattactagtggttatgtgggtccacaacctcccgacaaaactcatgattatactttaatggtgtttgcgttagacgatactctacccttagaaaataaatactggctcaatgacttcatccacgcagccaaggatcatattctagcaaaagcacaaattgatttgccaagtcgtgcatgaggaggaacttatagaggaggaacttataatggaaacaagaattttctttaatccaggcgattcagtcgctaatattcatgactataatgaagctgttcgaaagggacaaatttttaaacaagcacgtcacaatgacgaacttgtcatcgccaaagatcctaacgataaagaatacgcaattttttacgctaaggatgccttaccagctgagcacgaaaaatcaaagccctacgaaattaaaaatcggctttaaaatagaaaatgactcgcggaaatttccacgggtcattttctatttcgataaaaagcttaacgaccaccaacaattttggctgtcgcattttcaagccgttcaattaatgaatcagcatcgttcttaaagtcatcaacaaatgagctcgattgtggttgaatgcgtcctacttcatcacccataatatccgtaacgactaggtcatccccatcccacttcacatcatcataatgaccttcaagagcttcatcaaaaaatgcttggagtatatcccgaacagcattttgaataacagtcttttcgtcaacttgctcaccacgtacctgatgttgagccagctgcattgctacttcttccatattttctggaatttcaacgctcattgtggattcctcctcttaaaaaattaatggcgacgtaatttccgccgagcctttttactaaacttgattccttgaagggacttctttttccgctttaattgtgaatcaattttgttatcgctactcttagccacttgttgcttttgttgcatttcgcgttgacgcttgagcaggcgtttacgttcatattcgccccatggattcaagaggccacgcataaagtcagcaacttcctgcttatgttcgtccatccacgcttctgctacatctgcatcatcagtatcgataccattactattgatgaatgataaaactaattgagtttcacgctcatcacgatttaatgaggcaagcatgtcttctgatggttgcatattagcaattgcctttaagcccaacttgtattgatccatgttgatgtaatcattttgcttcaagtattcaaacaaggcctgcgcgctcggtacgatgttgtgaatttgcttaattgaaatatgtggatctaatggcatcatcatgcccaatacgcgttgcaagttgctgaaagtccattgacctggatattcattgcattcttgtaccattaattccaagaactcttgcacaacatagttcaactcaacatcatctaattcaagattattgaattgggaagcagacttaatagcttgttgcacatttgctaataagtccttgaacttctcaggtgtccatgtaatttcttttttagcaggacttgcttgaaccgaggttgcttctgcttcgtcattttccgcatccccatgtaattgggcccatgtcttatgtgctttccgacactcgttcatctttgtccgttgttcttccattgcttttacaacttccgcaagattttcaactttcaaaaattcttgataagctcgcaaaactggaacaaccgcaattccaaattgattagttagtgctggatcagcgatgaattccccgaccatgaccgcttttactgcttctggtgtccaagtagtatcggtcaaatgctgatcatttgccatctggttattaaaacgcgtcaaaatatcctgtgcatgcttttgctgattagcagataactgatgatagttggacgaagtaagaaactggtcaatatgttgttcttgttcgttcattatctatatatcctccgtctccaaattgaattttcctttctatcatatcataattatatctagtaaatataacaagattgctaatatacaaggagaaactataccaatgcaacgaaaaaagatccaagaagcaatgaaaaatgtctattttcaaaaaatgactgcaaatggctatcatgaaattgaagaacaaattgcaaaattacaacagcaaagacctgcaaaaattggacaattaaaagcagcccgtgcgcttggtgacttatccgaaaatacagaatatagtactgctaagcgtgaattacgccaccttgagagcaggcttcggtacctcaataaacagcttcaatatgctgaaattgtgacccccaagaatgatcacactattgatttagggacaaccgtgataattgaatttgaggatgaccatgaacaagaaacttatcatattgtgggaaagcaggaagctgatcttgccaaacaaaaaatctcctttgattctccccttggtcaagcccttcttcacaaaacagctgggaccactgtaactgttgaagcgccgcaatcttcatataaagttaaaattgttaaaattgaattatagtattgataagtcattcgatatttcgtaatccgctaaaggaaatttttaaatttattattttcaacgatagggttaattttccgcccttcaattaatctaagcgactgattaaataaacttttgggtattgcatccctgattttgacccggtatactattaaacgttgcttttttacatccacaatatcttgtggttactagccggcagtaaccacaaaattgcacaacatatagtagagggagttagattaatgattagcgattattttaaatttcttgcccaccaattaaagggctggccacaacaaaattattacctattctttttcagtcttggctgtcaggtaatgactttagttagtgctccaataacgcgggtaactgtcattacatttattggaaccacgcttggagtactttgcgttttagcaattaatgctgctaagtcggtaaatggtttcttaggtattttatcggcattatgtttcatcattgctggttttagtgctaaaaattatttaagtattgccgaacaaatcgcctatgttattaccctcgatttaccagtattactttccgcaaattggaatgttaacatggcatcaaagatccgtaaattcaatgctcgttcatggacggttgccatcattgcaacaattattgtctatctcgtttctggttatttaatcggtcatcttactgacgatccacgaccatggattgatgcaatcagcttttctattagtctttccgctggtgttatttgcttcttgcgttttaacaatcaatatttctggtggcttgcatctggtcttgcacaactagtactctggtttgtttcttacaagcaaggatctgctactttagcaatggccgttaatagctcgatttaccttattaatgatgttctcgcctttaccatttcaccatggtacaacgaacgtgaacgtcaacgtctcagtaaagaagaagcagcctatgccaaagcaatgggcttagaataaatctaaaaacagcaaagagattgaaaattcagtcaatttgctgttttttgtttaatattgtttattgtattcataaactaattctggttcacgaccagtacgatgataagcatttaatgcatctatctgtgccatttcttgggcgttaagttcaaaattgtaaatatcagcgttttgggcaattctctcttcatgaactgacttgggaataaaagaaacaccattctggagatgccaccgcagtataatttgcgcagtagatttattatgagcagcagcaatatcttttaatactggttcattgagaactgctcctcgccctaatggactccaggcttgcgttactatttgatgttgacgattaaattctaatagtggtttttgtgttaatagcggatgcaactcaatttgatcaacaactggcatttcatttgcttgggttgccaaatattgaagatgaatcatttggtaattacttacaccaattgacctagtaagcccttcctttttcatttcttcaaaagctcgccaggtgtcaaaaaatgatcgttcaattggccagtgaacaagcaacaaatcaacgtaatccatttgtaatttacgtaaggattctttgacagattcaatggccttatcgtaaccttgattttcttctgccactttagttgtcacaaaaatattatcgcgcggaatggctaattgcttaaaagccgtccccacttcttgctcatttccgtataactgagccgtatcaaaaagccgatacccatcttcatatgcctttttgactgcttgattcattgtcgcttggccatctaccttataaaggccaaaaccttcttgaggcatttcatttccatcggcaagagttaataggttgtccttaatatccattgaaaatcacttcctttccttatctttaatcagtaactgaggattgtcaatatcgaaattttcctttctgaacaaactaatgtatgatgagtttaaatctatttacggggaaacaattatggctaaaatatttatcgctgaagataatcctgatattatccattccacaactcaagaattaaataaatggcaacacgatgttatcacagttaacgactggaaaaacgttgcaaatgaaattcttgctacaagcccagatctggtcttatttgatattaccctcccgacgttcgatggcttttattggattcaagaggttcgtaaacatagtcaagtgccgattatagttatttctgcggctgaaattgataccaatgtcatgcatgcagtggccgcgggggcagatgattatattatgaagccatttgcgatgacggtgcttttagctaaaattcaagctttattacggcggaataagcaaacgactgacgcagaagaaataatgtgggatcataattcattcaatccccttactaatattcttatgaacgaaaacggtactgcccagctcactccaactgaaggtgctatgctccaagttttactcagtcaccgtaataaaaccgtttctaaggagcaattacttcaatggttatggcaaggtggcaaataccttaatgagaacacccttaacgttaatattagtcggttaagaactaagctaagcacaattggtttacggcaatgtattcacacagaacgtggccttggctatcgattggtggaaaacaatgaataaacgttattttaaattattttggcgttcaatccttcttcctactattggctatctttttctcttaggtctggttgggcttttagtaattttatataatctcccaactgttttttggggcgatgtgattcgcttttctcttcccttttttatagtatggcttatcggtagtggtgcaattaaatattatcgattgcgccatttaaatatttctcagctcgataaattcactcctaccaatatgactgagggaaaacttgttgaactattgcaagatgaacaagcaaaaaacattgacacaattcgacagttacaagcaactcagcatgaacaacttgaccaccttgaattatttactcatgaaattaaaaactatttgactagtcttaatgccgcggcagaaaattcaccaactgtcgcaagtacagaagtaaaaaagaatatccaccaagctaactattatctcaatttgttgttaaatgacgaacgactagcgattaataatcatgattacaattttcaatggatcgatattgccaacttaattaataatattttgcaacaaaattctgcggtcttcattcataaacaattgattccagaattaaccggcttggacggaattaaagttctcactgatcgtaaatggttgcatttttgcattgaacaactactttcaaacgcaatcaaatactcatcccctaatagtacaattaatatttcctgggaaatgaattctttgcggatcgctgaccatggatgcggcatctcaatgaatgatcttccgcgaatctttgataatggttttaccgggaaaaacgggcaccgaacaactgctgctaccgggatgggattgtaccttgttaaaaaagttactgaatacttaaatttcaaggttagcatctcatcagttcaatcccagggaacgacagcgattctatctttcttaccagataatatcagatcatcaaactaattcttacaaaactgtaaggttctgtacacttccgtaagtaggaagttgcacagaacctttttataattaagacataatcaaaacaagttctctaccagaaaggaaaattactatgacattattaaatcttcaacacgttcaacgcgtctataatcgtaactctgccaatccagtaatggccttaaaagatattacctttaaagttgaagagggagagtatgttgcaattatgggagaatctggtgctggtaaaagtaccttattaaatataattgcaactttagaacaagctactaacggacaagcaatccttaatggccaagatctccggcagctttccaaggacgacgcagcacgatatcgacgggaacacctcggctttgttttccagcattttaacttacttgatagtctctcaaatcgcgacaacatttacttaccacttgttctagcaaaaactccggttgcaacgatggaagaacggattaagcctttaattgatcgcttacgtattaataaaattattgaccgttttccaagtgagatttctggaggacagcaacaaagaattgccattgcacgggcgttatttacccatcctgacctccttctcgctgacgaacctactggagctctagattcgaacaccagtaacgaaattcttgagctctttgatgaagttaatgctaacggtcaaacaattattatggttacgcacagtgccgcggctgctagtcatgctaagcgcacactcttcattaaggatggacgaatctatcatgaactctatcgtggtgatctttcccttaaagactaccaacaacaaattaatcagacaatgatgactttaacgaatggcggtgaataatgatgctctttctcaaactgattaattcgagttttaagcgtaatcttaaagtttacgtcccttacctcatctcaatgacaatgctagtcgctattaactatatttttaaggcagttgaaattaatcgcagtcttaaagatttaccaagtgcgacagttactaaagcattaatgcaaacaggatcaacttttattatccttgtaacacttgcgtttatgatctacgtcaatcgtttcttatggcaacagcgtcaacaagaaatgggtctttatagtatgctggggatgacgagacataacttacaagtgctaacagtcattgaaaagtgctatcttttagtaattagtctttttctcgggactttatttggtattatttttgatcgcctcgcttttcttggctttgctcatctcttgcaaattgatcatttatctcaaccttggattgaatggggcgctgtgataaatacaatcgtcatcattggcggctttttcttaattttaatggtcattgatctgatcaaactatttcagctaaatccaaacgaattataccacccccaacaaactaaaatcgcgcgtcatggtaagttctttacttttgccggacttttgggtgttgcagtccttgcctacgcctattatcttacaattacagttaaaccgcggatatctgctttaacaacattcatgactgccgtcttcttagttgtgattggaacatacctcatttttattgctggtagcatcattgtccttaaactcctgcaaaaaaacaaaggatattactatcgccctcgccactttatcgcggtttccggaatgttacaacggatggaacaaaatggtgctagtcttgcaacgatttgtttactctgtagctctgtccttgtaattttatttacatctttaactatgtatgccggcattaatgatacggttaattcttatgccccacgcgaccttacaattatcacctcgcagaaacttactgcacaacaagaatcgaccatcaattctgttgccaaaaaacaccatgctcaacttaataagcctgttacctttacaacgagcgctccgcaatacggatattgggaaaataatcgtttcatcaaccagggtaatttagagaatatgactaatcaaactaccaatacagtcattaccatgtcgacagcaacttataatcagattacggataaacatgttaaattagcagcaaataaggccttaatttattcccctgctaaagagcatcgcggtgctttacagattggtacacaaaaataccaagctactcctatctatgactttcactactatttcaatccaagtcacgcgatttattcgccaatttttataatcacaaatatgcttccggcaaacactaccacaattaacttcacaggaattaattatcacttaaatggtagtaagaaagctcatcttaactttgaaaatgaccttcaagcccagcttcacttgccaaaccaagtatattcttcccggacaaaccttcgtagtcaattgaccagtctctatggcggaatcgtctttttaggaattctcattagctttgccctaggaatcacgacaactgttgtaatttactttaaacaaattactgaaggttatgaagatcaatatcgtttcaagacgatgcaacaagttggtttaagcgagaaagaaacaaccaagagtattcatagtcaagtattgatggtctttatgttgccagtagttggtgcaataattaacctttgctttgcgatccctgcaattcggcaaattctaattcaatttaatttctataatgttcgattgatgataataattgccgtctcaattacctttatcctcctatgcctctactttgctatttacggacttactaccaggatgtatcgtaaaatcgttgagcaaggttaagtactacaaattgacatttcttattttaacagttacactttaattactataaataagtacgaccgataaaataaggagatgtcgttcatgattcttattaacaccaccattatagaaaaaattacaagctgttgctaaactactcacgacagattagactgcccttatttaggcgtggttaatctacggtattgcttagtgacagtttttaatttggtttagattatatcgaggtggtttcatgacggcagatccattaagaataggaattcttaacttaatgcatgacaaagtagatactcaactgcgatttacaaaagtactttctgagggatcctacaatgttgatgtacaatacttttaccctcaaacacactatacttctcgccctgtccctgacattgttcaagagatttcccagcctttagattttaaacaagttgccacaatagatgcttttattatcactggcgcgccaatcgaacaactcacatttgaagaaattatatatcttgatgagattcatcaattgattgacgtattagttgccaataacattccacaactttacatttgctggggcgcgatggcagctgctaactatctttatgatattccaaaatttcaattacctgaaaaaatttttggagtcttccacaattatttgcgcgcgcaagaccctctcttaaaaggattacctgatggctttcttgctccccatgctcgttatgccgaacttgatattgacaagattatgaaagatccacgattagttattaatgctgtgaccaaaaataatttcttattctcgttccgcgctcgagaaaagaatcaatactttcttttctcccatcttgaatacggaaaggatgcccttttaaaggaatacttacgagagcggaatgctaatcccggtgttgagtatatcaagccgcaaaactactttcgcgatccgcttcatatgaaagatcctgaatttagctgggcaactacccaacgagtattctttgataattggcttcattcagttgcggatcacatagctacacaacaatttgtaaaggagtaattaatatgacaaaaatcactaattcaatcgtaaatttaatcggtaatactccgattgttaagttaaatcgcgttgttcctgaagatgcagcagacgtttatgtaaaacttgaattctttaatcctggtggttcaattaaggatcggattgcccttgccatgattgaagaagctgaaaaagctggtaaattacaagcaggtggcactattgttgaaccaacctctggaaacactggtgttggcctagccatggttgccgctgccaagggataccatcttgtcatcaccatgccagaaacaatgagtgttgaacgtcggaaactcatgcaaggttatggagccgaacttattcttactcccggtgccgacggaatgaagggtgcaattgcaaaagcagaagaactagttaaagaaaaaggctactttatgccaatgcaatttgataatccagcaaatccagcaattcatgaagaaactacaggaaaagaaattcttgaagcatttggcgatgatattcctgacgcctttgttgctggtgttggtactggaggaacacttaccggggtgggtcatgcattgaaaaaagctaatcctaatgtccaaatttatgctcttgaaccagcagaatctccagtattaaaagaaggaaaaggtggcaagcacaaaattcaagggatcagtgctggctttatcccgaaagttcttgatactgatgtttacaacggaatccttgaaattaagagcgatgacgctattacgatggcacgtgaagttggtcatcaagaaggaattcttgttggtatctcagctggtgctaatatcaaaggtgcgattgaagtcgccaaaaagcttggtaagggtaagcaagttattactgttgctcccgatggcggtgaccgttacctttcaacagaattgtttaattactaaaaatttaaaaaggaaagagactaagatatttttaatctaatctctttcctttttcccattgaccgcgaccttacgtcattagctacacttgatagtatgaaaggagtggtcaatatgtatacgactggtcaattagcaaaaaaatgtaatgtttcaatcaggacaatccaatactatgaccgccgtgggttgcttcatgctaaacgaactgaaaacggattgcgccattataattatcaagaccttaaacaacttcaagaagggactgtgacataagttaagttactttcataaaaagcaaatacgcagtacaacaatggcctctaacgtccggtaaaaccgaacgttaaaggcttattgttgcttgcgggggctcgaaaacgaagtcacaagtgacttttgtctcgctctcagcttaaaagacattcaacagattattaatgacactgacaacaatattctaaaaagcctaattgttaaccaacgaagaaaactcaagcaggaaattaaagacgcttcagaacaattagcaagtctatctcaattagaaacttttttgaataaacattctgatttcccaggaaatatcagtcaaagtgtttttgacaagatcaagaaaacaaagaagttaaaacagttacgaattaaattattgcttattggtatcagcatcgacttcattctttggggtagcattctttactttcttttttatcaaggaaatttgatatggttattattaggaattcttattacagttgctttaacttggtatattgctataaattattaccatcatacttgctatatttgtcctcattgttttcataagtttagggtgtcgcttagtaaatggctttttgcccgtcatactcctaatacaagatatcttatctgtgacaagtgttcacaaaaaaattattgtattgaagaatattattaacaaaaatgaccaaggcgcacaattgctaaaccttggtcatttttttgcattttatagtattggtgaaagcaagcgagaaaagtattgcttgaatttccgccactttgactgattagcaaaatactcaggagtaagtaacgtactctttttcatgtcactttcaaagtcttgctttaactgcgctgttagtttttcattatacgcaaatgcattgacttcaaaattaagtctaaaactacggtaatccatatttgccgaaccaacagaagcaatgttgctcccactaaccatcgtctttgaatgaataaagccattatcgtacttgtaaacttttaccccgttgttcactaagtatttagcataatattccgttgcccgataaacaaatggatgatcaggcatgcatgggatcataattcggacgtcaattccacttcttgcggcaattactaatgcttccagcactgaatcttctggaataaggtatggcgattgaatatagacgtattttcgggccgaactaataattgattcatatccccgtcgaattgaataattttcattatccggtccagaagatacgatttgcattggaacctcatctggatcgccatctggtgcaaccagttcaaaattcttaaattctttttcaaggtcaattttctttttatgagtttttcgacaggttgtattccagtccatcgcaaaccgcactgtcatcatcatcgttgcttgtccgacgacacgaaggtgggtatcacgccaatagccaaacttaggatcttcgccaaggtattgatcaccgatattgaatccaccaatgtaaccaatcttgccatcgataatagctagtttacggtgaagatgataatttaaccgtggcgtttgaaaataagctttggcagcagcaataaacgcttgcgcttctccacctaattcttctaaatgcttaaaaaatttgaaagtagttccatgagacccacttaaatcatagagaacacggacttttactcctcgtgcagctgcatcttctaaggctgccaacacccgcttccctagattatcagcataaaaggaatagtattcaatatatacatgatcagttgcatgatttatatcgtcaattaacttatcaaacttctttttcccatcaataaatacgtgaactttattattaaaggttactactgaatcattcaaactcaaaaaaaggttaaccaactgacgatcacgcgacaaccggcttccttttggcattaattcatgttcttcacttaattttcgttgtttttcaagatatttagtccgtaattgtttttgctcatcttgaatactaaatatctcatcatgggataattgtcgtcccacaaaaagatataggataaatccaactactggcaaaatagttaagactaatagccatgcccaagttgatgcaatatcccgacgactacgaaaaacagtccatactgcaaaagcaatgttaatcaaccataggacttcaataatgcggcgaataacatcccatgtccaaacaatatccataatttaataatctccctagttgtattactgattcattatagccattatttgcttacttttcagcaggttcagagattattttcggtaaaaacgacgaagggcaaaagataacccgatcgctaaaagtccgtacactgcacctacatagccaagcatcgttaaattagcaaagttaacagtagtagaagccgtaaaggatccaagtgaaatcccaacattagcaaaaattgaaattaatgatgttgctaaagctaatgactgcggatattctttttctgccacactaataaataccagttggatagttgttccatatataattacaacgacacaaagagttgctagaacaagcattcctgtaatcttatttcccaatgcaatcccaagaataagacttaatattgtcatgagaataaagacaaatggtaatttttgaaccccattgtgactcgcaacgattccagcaatttcgttaccaataatactcattacccctaaaagaagcagcagccaatttaaactagttaagctaaagtccatcacagtagtaattagcggccggacataagtatagaaagtatactggagacttaagaccgccaccgtgattccaatccctaataaaacacggtgatcttttaatagcgctaattgttctaaaatgctccctttaatttgatgtgtatcacgaggagtaagccagactaacaacgcaaacacaattaatgttaatcctgaaatgatccaaaaactatcgtgccaggaaagtaatgttgcgatggttgtaccaagcggaaccccaatgaccgacgcaatactaaaacctgcaccgacccacgctagaaccattggccgcttgtccattggtgtaattatactaactagcaagttaattaatgaaataatggttccagcaacagcggcagtaataattcgcgcaaataggagccagccaagtgttggtgccatcgcagttaaagtattaccaataaaaaagacggtcattaatagcataagaagattatagcgattccaattgctagttaaggtagtaataattggcgtactaatcgcatagactcctgcaaaagctgtcaccaaaaaaccaactgtggaaagtggaacatgataactccgtgcaatatctgataaaacgcccacaaccataaactcattacatcccagcataaatgcaacaagaataaaagtgaacgatcgcaatttagcgtgcttcacaataaacctccttttaaaacaaaaaattttctggaaaaagtcaatccagaaaattataaacgtttaacaattaatttccaatagttttgaactatttagtttaataaggttgtgagtgataagcagtaaaggttttatcatcaaagcaaaccatcgttacttgatcaacataattggcattagggagaaaatctttaatcgtcctaatcgcaatttttactgccttttcaagcgggaaagcatatacccctgtactgattgaaggaaaggcaaccgtccgacataaatgtttatcagccaacagtaaactattgtgataagaattggctaacaattgatcttcaccattatcaccaccatgccaaatcggtccaggcgtgtgaataataaacttggctggcaagttaaagccgccagttatccgcgcttctcccgttggacatccatgaaatttttcacaggcgccatataacgctgggccagctgctcaatgaatcgcaccatcgacaccaccgccacccattaaagttgtattagcggcattaacaattgcatcaacttttattttggtaatatctcctttgatcacgttgatttgcggcattatttagcccttctttctttaaattgcggaaataaccagattaatcctgtaaaagcaaaagatttcattgctaccataaacccagtaatgaaatcttgtaaatcgtttttaccaatatggaacactaaactatctaatttcataactaaaatagtaaaaattaataaagttattaagattttaatttttcttttccaactcatcaattcccatttactttgactaattaagtaaagtatatttatggaaaataatcccaataaaatgtaattaataatccgccatttctcactatcaacaccaatataaattattccgcttgattgaagtaagaaataaatacatccagctatattgataaaatacaaaacagttaaaagttgttgtttatgtatacttgttctgtgctcttctttatagttatttatcatctcatgatcctcccgtaataaatcatccaaactaacatggtagaggtcacttatttgaaccaacataaaaatatcaggataacttcaaccattttcccaactagaaattgttttacgtgagatcaacaatcgttctgctacatcctgctgagtccatcctttttgataacgatataatttcattttatcggcaaatttcaataagttctcctaccttcaattaaatttatttcccgggaaattaactatgcttaagctttaccgaagaaggcgatatttgtcacgctaagaatcatagcaaacaaaaaggctggagaaacttccaaccttctgtaaatcttaaattaccaaatatgaacccgatcttctggcgcccggtacatttcatcgctaggcttaatgtcaaatgctgtgtagaagtcatcgagattttctgcttgaatattagcacgtaatttttgcggtgcatggacatcaattgaaagcagtaattgcatgtattgttccgttgctttcattcgccaaatagttgcccagttaataaagaattcttgggcattgaagtcagcttcagtttttgctgcttcaagtgcacaactaaggcctcctgcatcggcaatattttcagaaaccgtgagcttcccgtttaccttttgcccagcaaatgggatcccatcaaattcttcaatcatcttttgggctaattgcttaaagtgtgcagaatcttcatctgtccaccaattattaagatttccaaactcatcaaataatgacccgttattgtcaaaggcgtgggaaatttcatgagcgattactgcgccaatcccaccataattttggctgctgctttgtttcaacgagtagaacggtgcctgtaggattgcagctgggaatacaatgatattcttaaatgggtgatagtaagcattaactgtggccgcactcatttcccatcgcatccgatcaacaggtttattccaacgactgaatagttctttattagccgtcactgttaattgatttaggtttgcaatcaatgattcctcttcatcaaccttaaattgatcatagagagcaggaatcttatctggatacccaacttgaatgcccagtttatcaagcttgaggatagccttatcacgggtatccttactaagccattggttattggtcaagcgtcctttatagactttaatcatttgctcaaccatgtggtgaacgtctgctttggcttgtggtccaaagtacttcttcccataataatccccagctacttgactaaacatgtcgcgggcaagataaaacgcaaatttacgttggctaactggtttcttgcttccagaaagtgcccgaccataacgtccattgatttcacgcatttcatcatcaaggtaactggcattttcgcggatgacacgaattaatgcccagtttttaaagagttcaaaattatcttgtaagatcttattcagggacttaaagtattccggttctgtcacaattattttttccggttcttccccaactaactgcttaattattgccgcaatatcaagttgatcagtggcactagctagttctgcaaccgtttgtggattatacatcttactataatcagccgcttcttctgcactttttacatttggcgcaagaagggcatcgaatttgattgcatcatcaataatcttttttgcttcttctttgctataccccaacttatccatcaaggcttccaccattgaagaccataattggagtaattgatcgtgctgagccttcttttctgcttcatagtagctcttatcaggcaaaataagcgatggtgatgaggcaaataaagcataaacagtcgcattcttcatatcagcgtcaatatcaaaactaatcggtgaaggcatccctgctaaaatccagttcttccattgagattggtaatcttcatatgaattaagattttctacacttgccaacatccgtttaagcggttgtgggccaactttcttacgccaatcaaactttttagcgaggcgatatagtttaatcatttcgttaaaacgcgaatcctcagacttttccttcccttctgcataggcatcaaagtcatccatcagttgcttgtcaatgtcatcaacaaggtcattgaagcccccggtagctggtttatcatcaggaatcttcgccgtctttagccattccccgtttactgcttcgtataagtcgtctttaattagttcgttattcactgccatgtgcagggcctccttaaaaggttacattacttactattatactatgcctactagaaattcacgtaaatttgcttcaatctaaaaaaggacttaataaagttttccgtgcactttctgaaaaccatgagtcatgttgcatcagtaattgatttacttcctggtaattacttaagtcaacctttcctttaattaatccagcaatttggagctgccgagcaaattgaacatctgcggactggagaaagttgcgaaaaatcggctgttcatctggatcccaccgcttattaagaagaccaattgcccgctcatattctttgctatgggtaagtaccttttgcatggcctgtggatttaaaattgttgtcatcaattatcccctcatttctaatactcttcccggtggctcttttactgataattgattagcctttgtcatcattagccaataaacattttgataatgataattattgattctttcctctccccacccatcagtaataataataattatgcgatttcgtttagttagatggtgttgatggagatagtcaaaaatacactgaaaacttgtacccccgccacctgttcgtctaaaatcaagttttttaccatcatgtagtttttgtttggtggtcacccgggcatcaaacgaataaacattagctgtcagttttgttttcttaagcatcttttcaagtgtcgttagtgtttgaacgatttcttgatcggtgaccgatccggaattatcaacaaaaatgtcaatggctggatccaatctcgtaactttgccaggcaaatccattcgtaatggttgccggcgattaaagcgagcatgcgaattaacttgtcctcgtgcaatcaacccaaactgatgcctaaaaacctgccgccaatcaactattttagttttttggactttctgtagctgtgatcttacatttcctggtaacaaaccgcgatctcgttgcggggtttgcctccaggaacgattcaaaatctgcttaatattcgctaagcgcacgacctgattgctgatctgctgacttgtcttagattgctgccagccgttatgagtatcagctattttaacctcatctgccgttgcattttcctcttgtttaccaccattcaatttaagacctggctgatgtaatttttcttgctgttcagcaggcagctgttctaatatattgagataatcctgcgaatctaattttggcattagtttttgacgaagagctttctccaattggctaagggttactgttccctgaggtggctcagttaaatactgatttaccgctacatcagttgcaatctggactaaatcttgatgaggataagaagcataacgtaatggatgcatccagataagatgaagggcttcatgttctaataagctttgaagttcatcattacgaacgttcgctaacttttctggattaataaccagtacaaggcgattgtcttcccacctcaatcccatcattgcgggtaactgtaaatcattctctcgtggaagttgtaataacacttctccgaaaaggcgctgtttttgaaggatgataataattgcctccctaatccgttgcgcagatgtcacatgattattgcttccatcattttgatgtaaccgtgatagaaagtccactaaactcatcgattatcaccactcgtcgcaacttccgcaaaatattgataaagttgcgctacagagccttggggatgtttaatggcttgctcatacattacttgcaagaggtcgacgaaatcctcaccaactgtttgaacaatcgcatactgcccatcttcactgactaattggagatacttaataaatagagctgcctcttcttcagatgctagcttaggacttagccatgaacgtaatacttgaattttggttgcttcatcagcattttcaaactgctccttgccatctttagcgtctttcaaggttgccactgtaagctcttgcccctgtgcaaggacaaactgagcaaaggccacccctacttcatcacctaagtcaccactaaatatatcagcagcaagttctttttgcattttctggtctaacgcctgtaattgatcaagattgcgagaaactctttcccaagcacgtggcgtgggagccaaatcttcattgttcggatcaacaactaataattgttcaggatattgcgtaagataggcggaaacaaggtcattaattccggttgcttgggcccattttaaccattccgccgttgaactcgtcattactaaacgaactgtccgatctttaattgcagcatccccagtcgcaacaccatattcacgatcagtaaatcctgtcatcgtagaatcaggattttccgcaataatgatccgtactgcggaaggcaaacgcaaagcattaatctttcgttgaaggacaaggttcattagttcactttgaacagcttgcgttccacgattaaattcatctaaaaaccaaataattgattgattaggatgggcttcggcatacttaataatgctaattaaagtttcagagtaaccgaattgtacatttgcaagacgaccataattcttcgtttcaacaaaagattcactggtcaaggggggaaccggaattgcaaggtctcctttttcgcttaagctgacaaccgtagtaaataatgccgcattcagattagcagcaatttcacgaactaaagcagatttaccgatccccgcatccccgacaatattcggaacactacccgcatcgagaacaacgggaactgccgttaatagttgttgataagttagcgccattatttaccccttccaaccatgacattccagatccatgtcttgttttttcacgtttgatacatagggattgccttttacataaaagcggcgtggacttaacccatctttccccttcaaattaactccaatccgcgcagaaatagctatttctccaggaattttataattatgtaaatcaaccgttagtggacttgtttccataggctgcccatctaaatcccgtgaatgaattccgagagcttgtactaatttaccgggaccgttagtaatatttacccctgacatgtgccgattttcgatcattttatcgatgtttagcgccggttctattccgcgaagtaaaattccttgaggttcctctgcatcctgaaccacaatatcaaaacaataatgtccacggatttggtataggtaaatattcccgggcatcccatacaaagattccgagtagccagtgcgtcgtccgttaaaagcatgtgatgcagaatctttttctcctaaatatgcttctgtttcaacaatataaccaccaatgattccacttttagtttggtattttactagtttccctaaaagatccttcgcaatttcgactgtgggccgtccagtaaaaaattgttgatattttgttagcatatttattttcctcctaaaaagaactatcctaaacataacactaattaaaggagatcggcatgatggaactaaaaattgaacgaatttatactaaacctgttgatttagatggttatcgtatccttgttgaccgcatttggccacgcgggatttcaaaagaaaatgcacatcttgataagtggctcaaagaggtcggcccaagtaccgagctgcggaaatggtttggtcatgacgttgctcgttatccagaattcaaagaacgttatctcgcagaattaaccaacaatcctgtttactataattcattaaaggcaattgtccaaagtaagttgccgagtcagaacgttattctcctttacggggcaaaagatgaagaacataatcaagcaattattcttgctgacaagctccaaaaagatttacaactcgctataaaataatataattttgtattttttaggaataatttgttttataataatagtatgaggattttattcataattctctagtgcccattgtttcactgacttagttatataaattccttttgaaggtatcaataccacaaaggatttttacaaactttttagtgactttttctaatcgtgtaattagaatcacgggtaccaataaccccctagtttcattttgaaacaattatctgataaggtggaagtctattattgaagtggtaggtagacttctgctttatatttttaaatcaattatttgtcagcccaactacgaccatcgagctcaccggcggcattgactaggcgttgtgcttgttcaagcattaactgctctaatgcccggtaaaaagcttgatcttcatatgttgggctatttttcattaatttttttaattcttcgtgtgcccattgttgattctcatccattttagtcatcctctttttctcgaagccatccgatagaagtatgtaaatcatccagctcctcttgttgatcttgtaaaagtgccaataattgttctaatttagcttgttgaagaggatctaactcttgagcaattttaacgttaaggtggtcaataaaccattgcgtctgattgctaaaatgcaagaatttatctaaggtcaaatattgctgatagtggataaataaagactgccgctcttcttcactctgttgggcaaattgatagatcggcaatggtggcaaataattcatccccatcgcgtgcgctaaagcctgatatggtcgtaaaagttcagcaattgtatatccttgactggcacccggttgaaatgcagacgcagaatgagcaaccgtcgtaacaatccccaattcacgaccctttagcaaatgactgcttgtaagttgtgaattccatacctcatcaagccattgctttaagatcgccggcgcactataccaatacagcggaaattgaaaaataattcgggttgccgatttaagtaattcctgctcttgagaaatatcaaaaggtgtttttaattcatgccacataacgttattttcatcatcagcggctgcctttaaaaatgattcagtcgatgaattcgcaagttgagggtgagccactattaccagtgttttcatcaatttcactcctttaattctgcaaggccttgtttcaagacatcttctgtaacatcgacagttagaaatcgttgcagaggcgtttcactatgacgatccttaaaagccattggttctgcttttagaattacaacagtcaaattattttccgtcagcattaactgacccggatatttaaatttccccttagtatgttttccagtccgccaagtatgtaatttagcctcaccattctggtcaaatttcaactgatactttccactagcatctgtttcgacgggaatcccggtaaacttttgaacatcatacttatcttttttacccataatatatccttcttagtaattaatctaattttacggttccacttttaattggtccgcataggcattaacctcatcctgttggtcttcacttgtgtagtaattatttatcaaattcgtaacagtggtatgcgtagtagtcattggtgcccctgtcacattttgattttcagttgatccaatcattttaattgtgacatcattgcctttacgtttaaaccaaatatagctagtcaaatcaccctgtgttgttacatattgataatccgcaacttcaccataaccataatgcgttccataatacatttcaccattttgaactcctgccttaaaccaatcagggttctttaacaatgcaactaatgttcctagctgctgggtagttaatccatccttatccgtaattgtaactttaccacgcatatcaataattttggtgttttttgctactttcaaaacacgattaacttccccatgagttttggcatacgtcaccatttcagcgagtgttacgcctgttttgcgaataccattactactgttcgcatagtaaaccttatttccgacaattgtataataggttgaatttaaacgatcgccatcttcatcacttttggaagttaatttaatcatgtataaaactttggcgcctttaggataagtcttagcagaggatccctctccccatggcactgcacctttatcataaatcttaactgttgctccctgattattgttttccatatcagcagaataatcataatcatttgctcctggcatatgtgcatcacgatagtacaacacaagtgcagcagtttgcttaagtgttaatcgttcagcgtttagtgctgcatcatcccttatttgttgtgtacttgataaagaactagtcatactactagttgatctattagtacttgaggatgttctcccacaagccaccataaccatcatcgtcaatgaaagcatcaaaattagcgctatttttctcataaagatactccccacagatcttatatttaaagttttattataccttaatctttaggagtcatctaaaaagcctctataatcgatttggagacttccttttcattttattcagcaaaataatccttaatttctttgtctgacaagtcaaacttttcttttatctctttcttgaattagctgttctttttctttgagtcgatcctggccttctttaatttcatgtttacttttctgaagttctcgttttccttctaaaagctctcgttttccttctaggagttcacgttttccttctagtatctcccgtttgccatcccgtatcctacgttcaccctcacgaatctttttctcgcgcatttcttgatccatttcatatactgaacgtcgcatgtattccggcctccatttccggttccgctttacaactgctattctctcctttaattttacgacaagcggatcggtcgcttcaacttttcgttgggcaatatcgtggaggtcagctacttgcatctcaacatcataatcaagcatcactttgttgaagatatagtcatcggctaagcccgccatctcctactttttgcgtaagaattcattcatcgttatatccccccgttaaatagttctataaagatatatacgtaaaaggcaaagattttcacttttctactcaatatttttccaatgtatcattaatgcatattaataatgctttatcttttggctatggataagattcaactataatagatagtgaaaagtaaatcttctttattaggtattatctatggtatgtgtagataggatgttgaaaggaagcaatactatgttcgacgttatcttttggattcttgcaatctggtttgtagtaaacgttgtatggatgtggtttgcccttgataaccaagttctacaaaaaacattcgcatggattaatgtatgtgcaatcgtaattggtttttgggtatattacggcatgactcacgacggcaacgcccttaacggctggttccttacaatgaactgggtaaacattgcaattgctgctatccaattctactttggttatcgtgaaaacagcgttatccacaacggtcacacaaccgcatgattgatttacttttcaactagaactatggcttggggtcatggttctttttttgtaaatcgagtaggagataattgattagttcaattatcgacctctcacaccaccgtacgtacggttccgtatacggcggttcgacaacttaatcacattgaattgactggagcgtcttggacatattcataagtccgagttgttccagttttctattagttagagaatagctcaaggtcttactgtgtgcagttcgccagtagcccttgcgggtactagcgaagacatatgcatcacgctgggacagccccagcttctgtaagttagttaccttagttttaagcttcttccattgcttccagatatactgtcttattcgggccctcaaccacttgtcaaggcgttgaataaagtcagttagtttcccaattgagtagtactgaagccatccacgcatttttcgatgaatttcttcaaacattcttgtcagggatattccacgattacgtttagttaataacctcaatgctttctttactcgttgttgcgattgttttgctggacgggcgtaggctccattgtggtctacacccaacgaaaagccaagaaactttaaccgtagcgggctaccgactttggttttatctgggttcactttaactttcaatcgcttttcaagaaactgggtaatgcttcgcattactcgttctccggctcgttgacttttaacataaatgttacaatcatccgcatagcgcacaaagtggtgaccacgtctagtcaactctttatccaactcatttagatagatattcgccagtattggtgacaatggccctccttgtggggttcctttttcactcttagcgaaaagcccatggtctaagactccgctagttagaaacttacgaatgagccttagtgtccatgggtcatcaatatattgttgaagatacttaatcatcaagtcatgattaacattatcaaaataggcttttaggtctaagtcgacaactcttcgataaccttgattataaagatctactacttttgcaatagcgtcgtgagccccacggtgagggcggaagccaaaactattatcagagaaaacacgctcaaagataggtgtaagaatttgggccacagcttgttgaaccattcggtccaccactgttggtattccgagttttcttactccaccattaggcttcggaatttctacccgtttgactggtgctggtttatacttgccctcacgcaaactagcgatcaattccgtcttattttctctgagatatggcagaaggtcattgactgtcatatcgtcaatgcctgctgcccctttatttctcttaactcgcaaataagcctgattaaggttattgcggtccaagactaagtcttggatagtgacactcatacctttaccttcaccataatcggtactacgcgcccttgtgtactttcggttttccaaacctatcctcgacaagcggtcagcttgttgttctgttttctgcgattgtcgcacctgattacacctccgatataagttacaagttattgtcgttcagtccttcatctgattactcagactactatgacctcggctgacttctggcttactcaacgctacatcactgcaccgcttgtttctgtggaaattaaacttattcctcttgtcggaaacgtgtaggccagatctccccgggtaaggatattaactttcgtaccatgtcaccggtagctttactgaaagtaacttcgagtagtgttggactttaacttgtcatgcagtcttatccagttagttccagccttatagctacttcttgttcatcggtgcagtactttgccttagacttccttcagattccacctcgcagtggacacccttgtcctcagctcatggttccgactactacggcccatagcggactctcaccgcctagctaatacccatgccgggcgcacaaagaagagagtatggaaaaactaaaattttcccacactctcttttcaatttttcatattgatgacttgaactatttaaattctaaaacatataaaagcaatttattactatgcactgaaaatacacttacttcttcccaaacaaagctgccatctttgctgctacttcgggatcaagattatcggcaagcgtactttcatttgatttttgttcattttgctgattagtgatcgtttgcttaaggtcatcaatgactgcttgctcaccaacttcaatcggattaaccgttaaccggccacctgcagcatcagcatgaccgccaccattaaagtatttttcagcaaatttagccacatctaactttccgttgcttcgaagcgacacgctaaccggactgactaccaaggccgcatcgacttctggatgttgcactaataattcgtgggcaatttcagatttatagtcacttgcatatacgacactaaatttatgatcatcgatatctgtaattaaaatatctttcaaatggctcttaaggtactttgcccgccgttcgtttagtgtccgaatcaacagccgattttcttcctgatattgttgccagctggtattaaaaacattttggacaaactcttctgaatcttggaggggataaaaccaaaagagctgatcaagattatcggcatcaattctttcctgctcattcatttctggatcattttgccaatcccaagtatcatatgcccgaatcaattccacaagataagcaaggcctttttgccgttgctcatcaatctttgtaaaagacgattgttgttttaaccaatcccataccaagcttgtggcacttgggttaactgttggatcagcaggtacgatactattggccgcatacttttgtcgtagttctgcttcactttcatgatggtcaaagacaagccaatgattagcgaaacgttcattcaataacttaaatgaataatcgctatctggcgtcatatccatgatgtaaacatctgtaaatcgccctacttccgctgtttgcatccatcgacttaactcttcatcgattcgtccagcgccacagtttgtcatatcaaactctgtgtcttcaaacattactggttgtagtgtttttaataataatggagccccgaatccatctaaatcattgtgggaaaataattttattaaccgttgtgccatttttgatcctcgcaattctgattttgtttcttattataccgtagaaaatcggctaaaccacacttaattactgacatcacgctaacgaactgctatcattgaaattagtaactcattttaagaaaggaaaataatatggaagtttatgattatcgtcaagaattgattgacctcttaaataataccgctgatgatccacaaagcttactgcagacacagcgaagtcttaccaccattcttaatattttaaatcattaccaggaaagcaaacccgttaaacaaaatgcaccacggtttgttcaacgcaaaattcaatcgtcaaacgagttgcctccgcaagcacgcaaaacattgaagtcactgcttaccggtcctgctaatgatgaagagaagccaacctcaacggcaagcccagttgcatctccttcagttgaagcaccaaaagaaatcaccgaagaagaacgcctagcagccgacaatcgctacttagtacaccggaaattaagtggagccgagattaatcaccgttactacccggaagcaattctgcatgcattaccatttcctattgaggatggggacattgcccaactagactatgaacaaaaagtccgcggccttccagttattcggcagattaccggtgaccaccttagcgattacactcccgaaaaagtcaatgtgattgaatatggtgaattaaaacgcgtgcccggttctgatgtgcttcaactgagtaaaacaattaagggtaattcaatcgttgacgaagcgccagaaaacaccatcgtaattgatccctttaagtaccctggccgcgatattaagccaggaatggttattgattttgcctactatgatcgaggaaatggcctaactgataccaaagatggcgcgattcgctggattcatgaaaagcaagattatgatacaactaagcaaccagctaaaccaaaagttgttaaaaagcctgctaattctcgtcatgattatgagaaaaagctggactatgaccttcatcaacgaaaggtacttgttattaccggaatccgcagcaaggttaagggtcttaaaccagtcattgacaaacaccacggtctgttccgcggattagatgcgtctgcagaagaaaaagtttctagcagtaaattaaaacgcgaaattcgtgatgcagactttgtgattgtctgcatcgatgcaattcaccatcgaattagtcaactcgccaaccatcacgctaaacgttatgaaaagccacttgccattgcaaatgttacttctaatactgctgttgagcgagccattgcccgggcattaaatggtgatcctgcatacgccgaaagtagcgaagatttgaaaaattataaataaattttaatttactgttgacttttatgagaaataggttaatattaatgacaacaatttaattattcgatcgcaatgagaaagaagagtatgttagacgatagcttcagcgagtctcgtttggtgtgaggagacagttttaactctaattgaaaatcactttcgagtctacagcttaaataccagtaagctgtagtggttacacccattatcgtgtcagcgtatcgccatgatggccgtacgtgtgaggtattgttagcaatagcagtacaatgatagggtggtaccacgctcagcgtcccttagccagtttggctaagggacttttttgttgggatcagattaggaggagaaaacatgcaagatttaacatcgcgcaagttaacattcaaaaactatttagttgttgcatcattgcttttcggtttattctttggggccggaaacttgattttcccgttacaccttggtcaattagctggtagtcattggggaccagctgcagttggctttctgattactggagttcttttaccacttctatcagttctcgccgttgctgttacgcgtgcagaaggggtctttgatatcggtcgtccgcttggcgtcggtttcgccttagtattcatggttcttatccacgctacgatcggtccattattcggtacaccacggactgctactgtctcattcacagttgggcttgccccattcgttgataaacaatatcaatcccttgccttgctattattctcagctttattcttcggggcagccttcctcttctcataccgggaaaatgatatcttagctaacatcggaaaagtattaaatcccgtcttcttagcccttttattccttgtctttgttgttggtttcgctcgtccgcttggtaaccccgctaccgcacctacaactagtgcttatgttcacggtgcgctcactaacgggttccttgaaggatacaacactatggatgctcttgccggtcttgcatttggtgtaacagtggtaaccgccgttcgttctatgggacaacggtcagcaaaagatgtatccaaagtcgttgcaaaagctggtgtcctctcaatgggtgccgttgcttttatctacttattactaatccttcttggcgcaatgtctcttggtcgtttcaaagtttccccagatggtggagttgcctttaaccaattagttaatgcttatgccggtgcattcggacaagttgtactagcattcttgttaactgttacttgtttaacgacggctgttggtttagttgctgcttttgctcaagacttccataagcactttccaaaagttagctaccatgcatggcttgccctcagttgtctcgcctctttccttactgctaattttggcttagaccaaatcatcgcttggtcaacaccaatgttaatgttcctttacccattatcaatggtgcttatccttttatctgtgacatcaccactctttaaccgtgatggcgttgtctacttcttcgtggtccttttcaccgttgtaccagctctcggtgatatggttgttgccttcccagcggttgttagccaaagttcatttggcttatctgttgccgctttgcgaaataacttaccacttgcaagtatgggattatcctggcttgttccagcacttgtcggcttagtccttggtctcttagttcactggtaccgtcatcaacgggttgcttccaccagtatgcaaagcgaagtacattaataagtgtcttataggttaaaaagcgtgagaaatggctcattacaagagtcgtttcccacgcttttaaattattatttaacattatcgtattgggcaagattaaacttcttaatcgcatagatcagcttgctggcataatctggatcggttgcgtaaccattccgctgtaattcgtaagctgcctgttgataagtttttgctgtttgtactccatggaaacgtgcatgattatcagcaattccatttacaatgagcaatgtgtgcgcattaattgaatcagcccagctgttgtaaactgtaaagtattgttttacttgaacatttttaccccgaatattttcggtagtatacatttgaaccttttcgtcgtcactattagctttaattccaaataagttattgtatttattcgctaaccggctccgaccccagttcgattcaagtcctgcttgtgcaatcgtaatgctagctggaatatgatacttcttctgttcacgttgagcagctggcgcaatctgacgaacaaattcattgacggttatatctgtcgggtgggtctcacgttgaatttggggagattgatggataataatcgccacaatcccaaataaaataatcaaaaatgcaagtacacttccacaaatgatttttgtttcttttttcatgacgtgtctttcctttttatgaatttgacgctattataaccacttcaccatgagaaagcgagaatttacaatgatcttatttacttttaagctcgtttttatagttacccgaaatgtcaatttaagttagaaagaaagtagttgctcatcagtgacgtaggacatgaatacctcatatggagttcgatagcctagtgatttgcggggcaggttatttcgcttactcatcagttgggtcaccaattcatcaggaagattgcggaaatctagctgttttgttaagccgtcccggcgtaaaagaccgttgttgttttcgttcagccctcgttgattgggagcaccaacctcggcaaagtaagtgtgaaggtcaaattgattggcaatctcgcgccagccggcgaattcttttccgttgtcaaaggtaatcgatttgaagaagtgctgcgggaatttccgaagccactgacctaagtgttggttaatcgcatcagccgtcttttcgtgcacattgagtacaatttcgaccttcgattggcgttcggtcagggtcattaccgccccttggtgctttttgccttggacggtatcagcttcaaggtgtccaaattcagtggcatagtgcggaaagtccttggcacgctcgtgaatacttcgccccaattggccagccttcccgcggcgctcaatatagccattcgggtgccgcttacctcgcatgggcaaagcacggacatccaaaccgaactgcccccgttcaaacatccggtaaagagttcgccggttacaactaattgggcgctcagcgcgcccaataatggtgtcaggcgtccacccctgggcaattttgtcgttgatataagtaagttcagccagtgacaactgagtacgttttcggccacaacgttgcttattgcgcatatagtgatcttgataatcagcaattgaggcaccggtttccaggtaacgataaacgcgataaacggtttcggcgctacggttgatcatttgggccactcggtacgctttaagcttttgcacgaaagaatgggcgatgattgtcagctcgtttgtggtaagatgggtgtaagtcatttgtggtttcctttcttttgtttaggggtattcaaaagtctaccacaaatggcttttctatttttctaacttaattttacaaacggcgttattaaagtatttactatcagtcatcttcaatttaggaaagctcttgattagccggcgatgattccaactcaattgcttaccagctccctctttgtttagatgttgagcaaagtaccgttgccaatcttgaaggtgatctttaattgctaatttatccttaggagctgctttttcaagttgatccagcagtttctttcgataagcggctgctcgttcatcccattgctgagttgtaatatggaatttttccacactaataacgctgagaatagtgtcagttcccatcacgaggacaataattagggcaagcatcccgtgggtccatgattcttcccagttaataatccgctgaataaatggctgaacaaacttaaccagcaagacaacgccaatcccccagaaaaatgaaatttggagagcaactcttccttgaatgtttccttttagatgcgaatagtcccataacttcatatgaaaaagtttttcgagcagccaacttgctacatactcaaagatcgaagccacaataacccctactacgaatagcagaaaaatattatcttgaaacggataggtagtaatcaaaatcgtcgtaacggcaaatccatatattggacaataagggccaaataagaatccccggtaggtgaaatgatggtccttaattgaacagtaacaggtttcccataaccagccaataaatgaataggtaaaaaataagacaatgatttcagaaagtgaatagggcactcgtttcccctcctttttgaattcattgtctcatatatttctatttcaagctaagcttttcaacgttcaggatcttatcaagccatccttcaaagaatccttgttcgtgactaactaaaattaaatttcccgggaaatcttgcagggctttctttaacccttccttagtttcgtcgtccaggtggtttgtcggttcgtccatgataagaaaattacatggggttaactcgagaatggcaagtttaactttcgtctgctcgcctcctgataaaagattcatttccttcattgtattagcagcgttaatcccagcccgcgccaactttgtccgaatcgttcgtggctgcatcgttgggaacatattttgaattgtttgcagtggcgtaagcgttgggtcatcccactccaaatcttggtcaaagtaatttatccgggccgatggggagaaggttgctgttccgcccaacgctggaattttctttaaaattgatttaatcaaagtcgacttaccaaccccgttaaatccggtgaacaataatttttcacccattgtcatcgagaaagttactggcgctagtaatggtcggttataaccaactgataatttttctacccgcaacgcatttgctgatccggtattttcatacggaaaatggaaagttgcttttagattatcttcgggtggatcaatctttttcattcgtgcaagcatcttttcacgcgatttagccatagtcgattttgaaccggccttgtttttccgaataaaccgttgcgccttttcaatgaccacttgctgcttctcatattcccgctcttgggcttccttccgctcttccttttgccgcattgcttgttggaaacttccgcggtatttggtaattttaccaaatgacacatcacaaatggtattcgtaacttgttcaaggaagtcatagtcatgcgagataatcattgcggcaccatcaaaatcattaagatagtcgattaaccattcaatgtgagctgtatcaaggtagtttgtcggttcgtctagtaagatgacatctgggttctccaatagcatcttcgcaaggataatctttgaccgttgtcccccactcatctcagagacaacatgatccttaccgatatcagttaatcccaaaccattcattacccgctctacttccgtttcaatttcatagaagttattagcatcaagtttttcttggattcggcctgctttggtgaggagctcatcatccatcttttctgcataatccgcataaagcttattcatctggtcattaagctgataaagttccgtgaaagcagtatggaggaagtcaatcaatgtcatccccgccggaatatctacatactggtctaagtatccaattttgactcctttttgccatttgatagtgccatcgaccgggagggttttcccgatcaagattttaatcaaggtactcttcccggcaccattttgcccgacaatccccatgtgttcgtgcttttctagttgaaagctggcatcttcatagagctttttatcggcatagctcattgtcaagccttcaacatctaatactgccattctattctctcctctttttcttacttattacgagctaaaactgctatccatactatcatattttaggcacgagcttcaatttattggcaatagtcctactttaatgaaacaaggagccaccatatcattcctaaaataactacaataatccactatttgtctcgatgatgatcttaaagaaattagcaaaatacttagaaccaatgggattgagcatcaatagttattttaatatggctgtccggcaactggttattcaaaaaaaattccctttgaaatcctggctgaacaagaagactctaatttgacaactcggcgtgctttaattgaagctaaagcgaaggacttggggattattcctgatggttcgcctcatttcaaaaatgttgatgaagactaatggatgaattaatctacaaaccctaattcaaacgagactatcaaaaattatagtccgatttccaatattagagggttaaaaattaatagttaatttccattctctataatgctttatttctgtcatatcaacgatgcaaataatatttgctagcaatacgtattcagatataataaccttatccccatagaaaagaggaattaaagtgaaatttggagatcgcattaaagagcaacgtattaaattagaaatgacacaagcaaatgtggcacaggaactttttactaccagacagacaatttcaaactgggaaaagggaaaaagttaccctgatttagatacgcttattaagattagcgatttataccatgttccaattgattccttattgcgggaggataaagatttgaaaaataatttagatagaaaaattacgaataaaaaattcacaccacttttcatttttataaatttcggcattagcttttggtttattcttcagccttacataataactaatcatttatgggcaagattaggaaatcttggattagcaatttcgatgctgggaataataataacggctggtcactttagcgcatatattgaagactcacctcttataagaaaaattaactcctttgttaaggaaaaatttcttaggaagtctattgttatatctgtgattattttggtactaattatttttacgctatatcctacatcagtctccctatcaaataaaacagatctttactttggattttttgtccttattctagcaataattaatgttattcttgaattcgcaaattggatactagatagactactagaaaaaaggtaggtgataaaagatgacaaagtaccaaaagacggtaagaggacgaaatccgcaactaggtaatagtttaatttcactaggtcctcatggtggaattaactatgaatttaaaggaactaaagattcttatggattacataaaaaaagaacatataaagtatatagttcgaataatcgagacgaatggcaaaaatataatcaaactattgaagagcgtaaaagaaaaaaagaaatagaagctaaattaagatcatacaaacattatgtaaaaaaagctggtactaagagaaagtataatctatggccagagatcataattgatgtattttactatcataaaaagaatactatttcaaaatatgatttatttttgcttaaagaagctcattattgtaattcaaaaaaatgtattgttacaaaaatcaacaatggtaaagtatccattagatgtaaggctcgaaatagaattccatacactaagtttatttctctttacaataatgcaaataaactttcatatgaggtttagggtctatttttaataaataacccttaaagaatattgatatatcaagcccctatattctattatcagaatataggggttattattttataattaggataaatagcccctaaaataatgatgcaattgtgacgaacaaaatgtaacattgcaattgacaatatatttgagactattgctttacttactatccctatgtatcgcaataatgataatgaattttaggacaggagtaaattgacaatggagtttgcaaagcaattaaaaaagttacgaacagataaaggtttatcacaagaagatatcgcacaaaagattcatgtgacaagacaagctgtttcacgatgggaggctggttcctctgttcctgacttagaagcagccgttcagttggcagctttctttgacgtaagtcttgactggctagtattagacaagcaaccagccgataatgttacaaatcaagatatattaaatgcagtcaacgagctaagagacgacatcgatgatctaagtgatgatattgatgatttagatgatggcggtgttggttttagtgataatagaaaatcatttggtagttttctcgaggataattggtttctaattatagttatgtgtgtccttgtatacatgggattccatggaggtatcagctcctggaacggtaaatttttctaataaaaggagagtagcatgaaacaacacgttctacccatcaaagacaccaacattctacgcgaagtccaggacaccttacttaataatttccgctatggtcgccgaaactataccatcttccaagtcggcaaggcaacattgcttcgagtgagtgatgtattagcgctgagacgcaacgaaatcttcgctgatgatgaactatcaagaaaaatgcgtatattcgcgataaaaagactaaaaagcccaatattttgtatctaaaaccggttaaacaggatttactagattattatgcctggcttcaagaaaatgatattcaatccgaatggctttttccatcaaccacgcaccaagaccggtacttatcggatttacgtaatcccttgtcacagtaaaaatacagctattataaaatggtataataaaaaagtgcactggcgaccaccaatgcacaagtatacgttgtttggagctgattccttttggagacgttctttcacgcgcttagctggtggtgtatggcagtacaccagaataagagcgattttgctaaacttatcagcccaactattgaatataatatttcattagacagctatattatagcatgagttagcaactttatcgaccgtctggcttaatgtcaggcggtttttaattttctatataccttactaatggattaatcatatttattggacatggaagcaacaatgtacttctatgtctatttatttttatcatatataattgacactaaatttaagtaatgataaaatctctaatatatatgtcatatatatgtgtcataaggaggggaccaaatatttgaaccgtgttaaacaatttcgaaaagatcaaggattatcccagttaaagctagctcaaaaaattggagtagctcgtcaaactatcaacttaattgaaaataataagtataacccctcgttagaactttgtattaatttagctaaagcattaaatactgatcttaattcactattttgggaggaacatacggatgaaagaaacaattagcaccaaaatcattaagtggttttacggtattcatggaccattagatgaatatcgccgcaatgaactcaatcgaatcggtaataatattgccatatttttattatcaataaatctattattaagttttattgctagccttttaatgcttagtactaataattctgaacttactcttgatatcgtagtaagcgtcctactattaactgttttcgcttctttaggctatattctatatgaaactaaacgacatcatttaacagaaattgatgttgaagccaaacaggagagcaagactaaacaaaaatttattaaaagagcaattggcttaggaatttattttgcaattgtaatgtacggattaacaatccttatcgattggttacctaacaaaggagccttaattccattacttacagaaccttctacaattagtagtgttattgtcagtggccttatctacggactattaatgggtacttgggaaatacatcaaattaaaagcgatcctaatgacaaaaaagtaactcaaaatcacttacatcaaaaatattggttagttttatttattattatcgttattactagccttctattaatacataagtaattatatttccaaaaaatagaggcagtagttcgtgcatatgctgaagaaaaagaaattattttagacactgcaaaaacctttgataatactgatgacgcaatgagggagcttttcaaggacaaataataattgaaaaattagttttggccatcaatttcaacttgatattgattttgactaacacatttctcgatttcattttagttgttttctcaattttaaatacttatcaattgagcgccctaattcaaacacagagcctataaacaaaaaattagcaattgcgtttaaccagctccacggaatcatatttcttaaacaaaatccagcaattgttagtattatcaaagatgaataaatgcaaaaatcgcttctaagctcttttatttccttttgaagcttatcattagatttcgtcataatagttcctttctcggaaagaataattgtatctagtcataataccatatgccaatgtagatactttaacaatatctccttaatttattaggaaggaaaaacttgattggattgattttagttacagaaaaacaacctaagattagtttctagccttttctgctatacgccgtagccacagcgatttctcaagtatagaaaatttttattccaataattttctattcaaattattacagcaatttaacaattatgtaacaaccgccacccttaagatatttttcatatcttcttcacaatatcatcatatagtaaaagagtgcacaattagttgcatacataaaagaaaaacaaacaataattcaggagtgaataattatcgctaagaaaaaaacaatgtcaaaagtccttgctgctgccttaggtgctgctggtgcattagctgttgctaacactgtaagtgctgacacacaagttcaagtacaatcaggagatacagtatggggatttgctcaacaatacgctactactgttgattcaatttctactgctaaccaattagctgaccctaacgtaatttacgttggtcaacaattagttatcccatcttctgctatcagtgctgcttctgctgccgcaacagttgctgcacctactgcaactgataacgctactgctagtcaagcagccgttgaaactactgaaacaaccgctgcatcaactacaccagctgtttctgccacaaacgcaagcaacgtagccgaccaggcacaaccaacaacagtcgtatctactgcttctgataacaacactactgctcaagttagtgccgtatcccaagttccagcccaagtaagtgctgcttctgctactattagcgttgctcaaattagtgctgcaaatactaacaacaacgttactactttaacaacaactactaacactgcagctccaacacaaactacatacgctgccactgaagcagttgctactccacaaagcaacactactgttcaaagtactgctgctgtaaccgctactccagcaacttcaactgctgctggccaaggtaatggttctactgctaatgcggttgccgttgctcaagcacaaattggtactccatatgtttggggtggtaaccaaccaggcggatttgactgctcaggattagttcaatatgcatatggtcttggttcgaactaccggactacttaccaacaaactaacctcggtgcccaccacagtgatatccaaaacgctcaaagtggtgacctttacttctggggcccagatagtgctccttaccacgttgcaatcgctactggtaatggtggttacatccaagctcctacaccaggtcaaaacgttcaaactggtaacatcaactactacactcctagtttctacatcagcatgaactaagatacgagtagtataatcattgagtaagatagaagattttcttctaccttactcttttttcttagcaaattttaataattatattgacagctttattatcattggttatacttaacaacaattaattaagtagggagtaagtataatgaacgtatatcaaactatcaacgttaatactcgttggcaaagccggtaattcaggttgtttcgtcatggatgcgacctgaagaacagattgcatctgtgccggctgagtttgatgttcatttcagtccgcatggatccacatgcggacttttattttgcctttcaaaaagcgagggtccgtcatgtgggctctcgttttttattattttgtgaggtgagattttagatgaaaagaatgtatagtttaattgcaattattatcgctttcctttgtttcgcattctttagagaaaacaatggattcgtaactaagcaacgaattccaaaagttggtgtgttaaccttgatgcatcacccagcgttagatgaaatttataaaggatatgttgatgaattagcaaaggaaggttaccacaacggtaagaatatcaagattgagtatcaaaatgcgaacggtgaccaaagtaatcttaaaacaatggcttcaaaactcgttgatgataactcaactgttctttttggaattacgactcctgctgctcaagcattagctaattctactaccaaaacaccaattgtacttggtgctgttaccgatccaaaaacagctggactagttaaaaataatcagcatccgggtggcaatattactggagtatctgaccaagcaccaattcgcgagcagctcaatttgatcaagcaattcatgccgcgaatgaaaacactgggggtcatctacacttcaagtgatgcttcagcagtagccggttatcaccaaatcaagcgtgaatgtcgtaagatgaatattaacttgaaggcctattcaattgccaacagtaatgacttaaaccaagtttccgaacaaatgcttagcaaggttgatgcagtaattgtaccaacagataataccatcgctggagcaatgcaaactttagttaagaatgccgatgctgctagcaaaccagtcttcccggcaactgacacaatggttaagcaaggtggcgttgcaacttacagtgttaaccaacgtgctttaggtgtccaaggtgcaaagatgacggttgcaatcctcaaaggcaagtcaaaaccagctgatactccgattgagtacatgaagcatgggactcctgttctcaacattaagcaggcccgaaaacttaacttacaaattcccgctcaatttgaaaaggatgcagaaacgaaaggagaggtttacaaatgaatctaatcgtatcgtcaatcggtcaaggactattatgggctttacttggtcttggcctttacctgacttttagaattcttgattttgctgatatgactgttgaaggaactttccctcttggggccgccagtgctgttgctgcaatcacacatggcattaatccctttctggcaactttaattgcaattggtgctggaatgctcgccggtttgatcactggattgctctacactaaaggaaaaattcccagtttattagccggaattctaactatgaccgccgcctactccgttaacctccgcattatgggtaaatcaaacgtttcgttgcttggtcaaaagactctctttagcggtgaattcatgcgaagtctgccccaatactttgatagtgtcttcttgggaatagttacgattgcgattattaccgtaatcctggtcttcttcctttcaactgactatgggcaagcttttattgcaactggtgataatcctgtgatggcaaaatcattcgggattcatactgacacaatggtcatcatcggtctaatggtatcaaatgggatcgttggactttgtggtgcgttgattgctcaaaataatggatacgctgatattaatatggggattggaacgattgttatcgcccttgcttcaatcattattggtgaagtagcctttggtgaattaacacttaaccagcgacttgtcgccgttactcttggtagtatcatttaccgaatcatcttacttgctgtgctacaacttggtttctccgccaacgacctcaaccttatctcctcagttgtccttgcaatctgcatgatgttgccacaacttgaagaacgcattcaccttaaaaagccaattttgaaaggagtccggcctcatgaataaacctattttggaattacaaggtgtcaaaaccattgttaataagggcacatcgagtgaaacaactattcttaaaggcttaaaccttaaaattaatgagggagacttcattacgatcgttggaacgaatggtgctggtaaatcgaccctttttaatgtcatcggcggaaacctgcacgctgacgaaggaaaaattttgcataatggacaagatattaccaatacaacagaagaacagcgaacagctttcttatcccgtgtttttcaggatccaaaactggggacggctgcacgaatgaccgttgctgaaaacatgctattagcaactaaacgtggtgaacgtcgccatcttattccccggaagctcaaaagtaatatggaccgtttcaccaagctagctgcaacaatgaataatggtcttgagaatcgcatgaatacagctactggcgccctttcggggggacaacggcaagcattaagctttttaatggcaacaatcaaacgacctgacattattttgttggatgaacacactgctgctcttgatcctcatacaagcttaaatctattacacgctactaatgaacggatcactaaagatcatttaactgccttaatgattacccataaccttgaagatgccttagagtatggaaatcgtctaatcgtgcttaaagatggtgaaatcaaagcagattttaatgcagagcaacgaaaatctcttacccctgagaaactttatacttattttgaaggatagtttgactatatatcaaattcgatatattaagtatatcgaatttgatatataggagacttaattatgaattggtggattatttttatcacatttcttgccgtaaacctcgatttctttttcatcttaatctttttactcgaaaggtataaccttcgtgatgtaatcattggctatcttggtgcccttcttgttctggttaccatcagctttttactaggaaaaactctcgccattttcctccctgaatggattttaggaatactagggatcctccctatttacatggctctgcatgacaacgatgaagacccaactcatgcagaaaagcacggcccaattattaccaccttaataacctatctggcagtttgcgctggttgtaacctctcaattttcttaccaattttaacgaatcttaccttccagcaatttactcaggcacttctttttatcgcagtcctttcaattgcgatcgtgattctcattaagggaattggtaatattccactaattaagcaagcaatgcaacgttatagtgaaaccttaatgaaagttatttatatcggtgttggttgttatgttttttgggatagtggattaattacccaccttattcaccttctttagtttggtataataattactaaaccgattaaaaggaggagcagcaaccattgtcttcaacccaagcctttattgatgaagctgctaaaatctataaagttttaagtaatagtacgcgcttaaatatcttatattatctccggcactataacggtgaaacggatgttaaaacaatcgttaatgaccttcaccttgcgcaaccgatcgtctcaaagcaactcggtattttgtatcgttaccagttagtcagtcgccataaagaagggacccgcgtttactatgctttagatgatcctcatgttattgaaatgattgatgacatgctaaaacacgttaaacatgaaattaagggtgaacctcatccccgaaatttatataaataaagagtgaacaggaaacaatcatcaaaagggtattctctattcactctttttttgttgttgattatttttcgctcttgtggataaaagaattgaattaataaaataatcagtctttcactttgtattctgagtagcgtaaaatgattagcagattgtcaaaaggagactcaaaatggacgaattatttgaacattcttcaatcaaacgcgcatactttacacttgcactgccggtcgtattgagcatggcagtaactttgatttataacatggttgacacctttttcgtcgccaaaactggtaaccctgatttagttgcaggagtttctcagggagccccgattttcactttaatgattgccctaggtgacatttttgggcttggcggtagctcagttatttcccgcttatttggtgaacaccgtgataaattagcacgctttgtcagcggttattgcttctatgcaccaattatttgtgggatcatcgttacttcaataatgattatctttcaaacaccaattttacatttattaggtgcctcgccagctacttggcaatatgcacgagaatattacttagtgattgcttggggcgcggttttcattatctttggactttcaccaactaatattttgcgaacagaaggtctagccattcagtcgatgatcgctagtatggtggggaccggaattaatatcgttttaaatccaatttttatttttacatgtggactcggcgcagctggttcagcgttggctactgtaacaagtactgttattggcgatattttaatgatttattatttgcgaacaaagagtaaaaagttgacgacttcaattcatgaaacgaaaatcggctggaagcttcaatttgaaatctacgctatcggaatcccggcctcggtcactaacatcatggcaacgtttgcggttgcgttaactaatcgttacttgattgtttatggtgcggatagtgtagctgccatgggaattgcgatgaaagcaaatatgatcatcaatatggtaatagttggttttgcatttggcgcgcaacccttgatcggatacgtatacggcgctaaagatgagcaacggtttaataaagttgttaaatttgacattcaagttgttgctagtcttacctttatgctcactattattcttttcattttcgctccccaggttattcgcattttcatgagtgatccccaaatagtaaaagaaggtgccttgatgcttcgctggctgtcagtttcgactactcttgctggtatcattctcgtttttacaaccatgttccaatcaatgggaaaagcaacgcctgcattttggctctcattctgtcgtcaggggttgattttcggggtagtgattagtatttccgcaaaattatttggttatactggaatcattgctgctcaggctatttccgattgtttaacctttatcctggcacttattttcttttattgctatcgtccgcgttttaaataaaatagatttagacatacaaaaaaaggcctctcccgtttaaatttttcaaacgttagaagcctcttattagtttattcggttatttttcgttcaaagtaatgagccagtttagcctctggataatatccagttaccttttctttcgcctgtccatccttaaaaaggaccagacttgggacgctcattactttataccgttgtgcaatttcttgatttccatcaacattcatccgcacaaacttgattttatcaccgtattgcttttctagattttgcatagctggttccatcattttacatggaccacaccatggtgcccaaaaatcaacaaccgtcattgagccttgaacatccttatcaaaggtctcagctgttgcatcaattgccattttattctaccttctttttctgtgatctacgtataaagtgaataataatcgttaccgcaaaaacaagcaagataaaactaccgaaaatccctgatggaatctcgatgtcaattgcaggaatcgttaagaaaagtttaatagcaatcacaaagattaagatatatgccatcggttctaactcaggaactttgcgcatcagtttcataataacttcagcaattcctcgcatacatgcaatcccaatcagaccaccgattaaaacaataaccggattattagagacagctaatgacgccaaaacagaatcaatggagaaaataatatccataaattcgatctgtaaaacaactgtccaaaaaagctttcgtccagttaaatgcgttttaccttcacgggtctttcgcattgctcgcttaccaaagaacttattatgaaagtaacgatagacaaggtaaattaagtaagcagctccaataactttgatttcccaaaagttaatgagatatactccgattccaataattaagaatcggaaaatgtaagaaccccaaataccatagaaaagtgattcttcttgttcttttaacgttggtaatacacgtgtctgagccgctaacacaacagcattatcaactgacagtaaacattcaatcataaccaacgaaaagatgattaaccaatcctgccctgatgtaacgactgttgcccagttatgtggatcaaaaaatggtccatacaacttctctaaaagtgacaattaatgtcctcccttaatttaaatttgctttttagctaagttatattttaccaaataattttcaaaatacgacggtaatggcgcactaatatttaaagatttcattacgaagggtaatatgagtttttgcgctacaccatgaagcagcatcccctctgttgataaaggattataaagcggatcgccaacaatcggatgaccgctatgtgccaaatgaaccctgagttggtgtgtacggccagtcactaaatgaagtctcaccaaggaacgttcgtgattacttgccagtgtttcataataggtcaaggccggctgcgcgttttgtccgtttacttgatgaagatggggattcactggattacgcccaattgcccaatcgaactttccactctgagccatcttaccctccactaacgccaaatattgtcggtgaatttgcccatcactaattaatcggttaaggattgggacaacaattggattcttagcaacaattactgctccactcgtttgtaaatctatccgatgaaccatataagcattattttgactatgcgctaaatagcctgcaacatcgttcattaacgttcctgtttcaccatggtaattagggtgagttttttgtccccgcggtttatttactactaacaaatcgcgattctcatagaggacctctaagtgtgattgtgaagacggaatataatcatttgcggcaggggtccgaatttcatcaccacaaaatagcaactgaatattatcatttcttcccaccagttcattcattgaccgatattcaccattaacaagcactgtccgcctaattcgtaaatagtggattagacgattaggaagcagccattgatcatgcagtaatttgcgtaatggttttgtcacctggtcatcagctaacttttcactaatttgccaccgatatttcatcttactcacctctctttcgcctaaattctgataagattattttactgtatttcccagtaaatatttataatatttttaagccggtttacttttatccgataatagcgttgaatagagtatgagtaattttaaggggatgggtactgatgttaacaacagaacaaattaatgatcatagtaaatggataagtatattcgaacctctcccccatgagcgattagatttaattgaaaaatatgaggttactcaagaattacttgattatgcaattgacccttacgaaaaagcccgggttgaaattgatccagatgcaggagttacattattaattttcgatgtctatgtaccaactcatgctgtgactgctccacagactgcaccaattggcatcatgctcaccgctaataatatcattacttttacaaatgcaaaaactaactttgtaaatggaatcatcgctaatcagctacaattattaaagaaacacggggaaaatgacgacaaattaaacttagtgttcccagttctttatcgcctttcgactgattattttggtccccttcgtcgtgcagatcaacagcgacaagaaattcaacgaaatcttcaacgacgaacgggccgccaagccattactcaatttatggaaattgaaactggcctagtttatattcttacctcgctcaaagggaatgtttccctacttgaagaatttaaacgccgctttggtaaccacattactactaagcaatataatgatcttgacgatgtaattgtcgaagcacagcaagggctagaaatggcacagatgacttcagatgtttctgcccgtgtctctaatgcttatagcaaggttcttgatagtgatctaaaccaaacgatgaaatacctaaccatttattcaattgttctctcaatcccaacaattgtatctggcttttacggtgaaaacgtcaaactaccccttgcgaacgggacctattcatgggtttttacaattttcattactattgtcttaatgttggcatgtgtcatctttcttattaatcgtcattggtggaaataaaaatcggaagctgagaacttttttctcaagcttccgattttttataagttatcgccacgttcaaattgaaatttagaattcaacaacgcttcatgtaaaagctggttaatcaatttatgtgtttcattcagaacatgattagcggttttcatattttgttcagttaggtagttaattaaattagctgaattttgaatctgggctgtttttgtaattgtgtctactcgtcctacgccatagctttgacaccgatcacggaaatcatttacctcattgataaattcatgatagtgtggttctacaatcacttctaacaatttatttaaccaataagcactcttatccggctgcgcatcatctgtcgcatacttatattttgccggagtatcactaatatttgtaaagaacggaacataagggctatagcaataaaagccaaaattaatccattgaatagcagcatattgtgccggtacgtcattccgaatttgcaaaatacatgaactttgattacgatcaagtgcaattgaacggaattttcgctgttcctccggtgttccagacgcataggttcccattggatcataaggagtgccattataatgcgatgagaggaaatactctacatcctcaacagcaattttcttttctgcatgttgaataaacggaattttttggctagtaggctcctgttttaaagatggggtaaagagtttttgaccataccaagaacgaggtgtgttgtagtaagcatccgcctcatcttgtgtgccaaaaatattccggaaattaaacgttcgtgaattagggtttaaatgatatttttctacaaaatctttaatttgcggcgcatacataaagctatcgtgatcattaaagtcgacttcttcaatgcacataatatttggtgcaattgcataagcatcatcaggaatccgctgggcaacccattgatggccaccaccggtctcaaaataccaaacttcatccttatcgctaaaggcaattccattactctcaccggtaccgtatttttcaattagggaaccaagacgttgaactccttcgcgggcggacttaataaatggtaggacgagataaaccattgaatcttcattaatcccgttttctactaacggatcatgaccaagcaccctggcatttgtcatctcggtttctgtcgcgctcatcgcaacattatattcattaatgccttgttcatcccagcgtccttcatcaggcatgccattgggagttgccgtataacggcatccctgtcccttcatctcaacagttaacccattatattttgaaacataatgttcaccggtgtaatccttggcaggaaatactttgaatatcttaggattgactccatcttctgcatcctcatcacgtgcaataattgttgaaccatcaatcgtcgcattctttccaacaagcattgccgtacaactactcattagcttttgcatagtatacgcttccttccacagtagttactgtaccttctaataataccactatctggaattaactggattataaagaaaaagctgaacgttaatcacacaagccaatctaaaatatcattaataccgaacaaaccattgaaaatgttcggtattagtgctaggataactacatcaaataaatagcctatataataccgaaatatggtcggttagtctctacctaaagccgtaaactttagactataagcacttcttaaaaactgacactgtctgtttttaactttaagcttttaaaaatcggtagagaggctgaattttcagtctcttatttttatttaggcgtgttaatttttggggaggtatattttgaaagaacctgtttcatctattcaagcacctagtcgtcacactaaaatcgatttcactcgtcaatggcaaaattttgtccttggtttccagcacttacttgcaatgtattctggggacgttcttgttccgctattaattggacattacttacatttctccacgcttcaaatgacttatctagtctcaatcgatattttcatgtgtggtgtcgcaaccctcttacaattaaagcgaacaccattaactggaatcggcttgcctgttgtcctcggttgcgcagttcaagctgttactcccctcgaaacaattggtggaaagctaggaatcacttatatgtatggggccattattgcagccgggatctttgttttcctaattgctggcttttttgcccgcttaaaaaagttttttccaccggtcgttactggatctttaataactattattggatttacccttgttccagtaggtttccaagacctaggaggaggtacgccaactgctgcttcatttggtgatcccgctaacctccttatcggctttctaacaattgccatcattctgttattcaatgcctttgctcgtggctttatgaaatcaatcgccattttactaggaattttaatttcttctttcattgcaggcgcattaggctttgtctctcttaaaccggttagtgaagctgcttggttccacgctccgcaattattcttctttggcgttccacgttttgatatgagtgccatgatcacaatgattcttgtttcgctcacgacaatgattgagtcaaccggtgttttctttgcccttagcgacattactggccgtcaattaacaaccaacgacttagaacgtggataccgcgctgaagggattgctgcaattttaggcggactttttaataccttcccttattctactttctctgaaaatgtgggtgttcttaaaatgtctggagtgaaaagtcgtcaacccgtttactatgccgcctttttactcttattgcttggtcttttacctaaagtcggcgctctcgcaacggttattccagaacctgtccttggtggtgcaatgattgtgatgtttgggatggtcggtgttcaaggagttcaaattctccataaagttgatttctctaacaatgccaaccttcttactgcatctgtttcaattggactaggattagggattaccatgtatccgcaactgttccagcatatgccaactgaatttcaaatcatcctgggtaacgggattgtcgtcaccagtctttcagccgttcttcttaatctgttatttaatcaccggtgggctaatcataattaattctcattcttttttaatttagttgttgacattcaaatctcagcacgatattataatttcaacaattatcgtttcagtagaaccttcgttgggcgtaagagagccggtggtgaggtgcgaaccggtcaggcgaagtgtttcgaattatcacgtgatctgaattgtccggccatattcagtgccgttaccacctgatatgagtgcgcataaaatcaagatgcgtaggtgggtggtaccgcgattaaaataatcgtcccgttgatacttttatcaacgggacttttttatttcttttctaaggaggaacaacgatgaagagtattcgtttcaaagaggccgcaaccctcttacttatcatgctaataattttagggactgccgtgattaggtttggcttgtcaccacagatccccgtcctatttgtcattgctttacttattttttgggttaagcttcgtggtgctagttgggacgagattcataagggtatccaagaaggaatcggtaccgcaatcatccccatctttatctttatccttattggcgcattaatcgctgtttggattcaagctggagtcatccctacaattatgattgtcggcttcaaactgattagcagtcaattttttgttccatcaacatttattgtctgctctttagtcggtctatccattggtagtggttttacaactatttcgacaatcggaattgccttatttggaatgggagttgcgcttaatgctaatcctgcgctggtagcgggtgcgatcatttcgggagccgtttttggtgataaaatgtcgccgctctctgattcaactaatcttgcctctgcaattgcaggtagtgaccttttcgcccatattaagaatatgatgtggtcaacgattccttcttttatcgtttcgctaattctattctggttctttggtaattccagttctcatatcagcaccggtaagatcgcccacacaatggctatccttaatcaacaatttatgatttcatggtgggccctactaccaatcgccttaatgtttatctgtgcatggcgtcatattccagctattccaaccttatttatcaatatcatcgttacagtagtcatgatctccttccaaaatccaggaatctctcttcaatccctcgctaaattaattagtgatggttttgttgctcataccagcgatgcaactgttaatacattgcttactcgtggtgggattagcaacatgatgggaacagtttccctgatcattgttaccctttcactgggaggaattttgatgaagtttaacattgttcagtcagcaatgaagccactcgttgatcatcttcacaagcctggcagtcttattactgttaccattctctcaggtattggcattaatctttttgttggggagcaatacctttccgttattcttccaggtaaggcatttaagggtgcatttgataaaatgggtctttcacctttagctcttagtcgtgtccttgaagatggcggaagtgttattaactacttaatcccatggggagttgccggctcattcgtcgcctcaacccttggtgtaccagtccttcacttcctaccattcgctttctttagtctgttttcaccagtcttctcaattttaagtggagttacggggattggtttgaagtggcaaaaaggaaagcaacacaatactacaaatgaaaatcaaataaaggaagcttaaaaaaaatctgggtttgagagtttctcttacccagacttttttattatcctgcaattaatacttctgttaccaataatccaccaccaaagattaaaacaaagacaactaccggccacacgaaccgcagccaatgagaatatcgcatatcaagcatttgcaaagttgccattactaatccagtcggtactaagaataacattgcatattgcccaaattgatatgcagtaacaaccgtatatcgtggaatatgaaccgtatcagctagtggagctaaaattggcattgctagcactgctaaaccagatgatgatggaacgataaagcctaagacaaagaataccaacatcatcacaataatgaaaaatgatccgttcatatgcgcaaccatttttgaagaagcatagagaattgtatcagaaatatagccatcattaagcactttattaattccccgtgccaaaccaataattaatgacacaccgactaagctagctgctccatcagaaaaagctgttgtggtcttatattcgcctaaaccttcttggtgcccgaaacatgttaaaaacataataataatatcaattgttaagaaagctgatgccatattaggaaaggcccatcctttggccattactccccaaatcataattgggaaagcacaagcaaataaaattaaaataattttcttttttaaagtaaaccgctgatctttttcttcgctagtagtcattccccacatttgatcaaatttgtcccggtcatcataggaataggagaactgtggattctgttgtactttgcgtgcataccaatgaaagtaaaataataaacaagtaactgcaataaccaagccaaaaattcgtcctgccattccttgcgtaaaagttgtcccagcagcatttgacgcaattacaactgaaaacggattaattactgaaaatgttgttccaagcgaacttgctaagaaaatagccccaacacaaacaattgaatcataacccatcgcaataaaaactggggctaagattggataaaaggcacccgcttcttcttcaatcccacatagggttccgccaagtgctagtaaaactgtcacgaggaacactaaaataaattctttccccttagttttggtagatagcgcggctagcccagattcaaaggctccacttgctttaacaacaccaatcaaaccacctaagactaagataaaaatcataatatcaactgattctatcgtaccatcgaccatactagagaaaatatcgctgaccgaagcaggatgctgttcaagccgcttataagttcccgatactgaaattggcttattgattgcaccagatttaaactggtcgacatcaatctgaatgtgcaatttatctaatgttgcctgtgttgccggataactaattttttctccagttggttgtgttacttggagatgatcattgacatatgctaacttagaataacttcccgctggaacaatccaagtaagcattactgcgatcactgtcagaaagaataaaattgtaaacgcgcctggcattttcagtttgaaccgatgtcttttctctgctgttgcttctcccatcttcctcactcctcaagtcttctttctcccttctgttaattttagcaagcgttttcttgtttcttgatataatcttttatttgttgtgctttaaccaaagtggttgaaaaattatcattcataatctgtctcctaatctactcggtttattacgattagccaaaagtcatccataagtttcactatttgaaattttttattatttatactaaaaatactccatgcattcaagcacagagtattcatctttacttattatattcaacaatttccatatcattatcggtcaacgttgcgcgcgtcaggcttccatttgctgggcgctctgtcacatcatactttccatgaccaaaccgttctactaaacttaaaacggtatttccatgacttacccataaaacatttgcattatcaggtaaatcagcattccgaattaattcaatacctttgttcattcgttgccagtactcttcattattttcggcatcatgaaatggatcagcatcctttaaccagtctttggcttgaccaatggaatatgcggttacaatttcacggaagttcttaaagccatgaggggcacccgcattgtaccaagcaagatccatatttgttccttcatatgatccataaaactcttcccgaaaataaggagcagtgactggatgagctacagaattagcattattaagatttaagattacttgtgctgtttccattgctcgggaaaggtcactacaaaacgcaccatcgaagtgaatgttttgtaacttctccccagctacctttgcatcttctttgcccttcatagttaatggcgaattactccaaccctgtaatttgttgtaaatgttgaagaaagtctgtccatgacgaacaagataaatattcaatttagtcataacgatccctccataatcttattgtaccgcttacaaatccttaagactatttaagtattaactttgagctttaaacataatttcttcatattctccacgtagactaaaaaatatagaaggaaggaattattatgaaacttagagacactagtcaaccaaatattgttgccgctaagattattaaagttactccgaaaaatgttaccgtaattactgaagaaggccacttactcaagattccattaactaaacaatatcgggaagataaaactttacgggcatcattggttgatatcttgaaagcaggaatatggattccagtaaataaaaagctaaaaaaattatttagttatgactggctttttgttcctgccttggtcccagcaaagaattaagtttcttcaatgatttccataaaaagaatgttttgtagtaatctatgataaaataattcttgatttgtcgaaattgcacttcgataatatagaacaaaccatattgattgcgaggaacattcctaatgaaaaaattaagcaaatttgtggatactaggattggttttttcaccctcctagttatccttttttggttaaagaccctgtttgcttactttactgactttaagcttggcgttacgggaatttttcaataccttattttaatttttaacccattagcgaccaccttttttatttacagtttagcattctactttaagcgttcgcggttcttctacccagttattatgggtctagatatcgcaaacaccctattactctatttaaacgtcatctattatcgtgaatttaccgattttatgacaattgctacgatgaccggttattcaaaagttaatcaaggtttaagtggtagttcacttgccctcactaactttcatgatgtcttttactggttagatatcgtcgtaattcttattttaatgctctgtaaagttatcaaatttgatccacgagcaattggaacgcggttagcatttgcttttagctccgttggccttgtcttatttgggattaatttatcttttgcagaaatgagtcgcccacaattactctgccggacatttgatcgttcctacattgtgaaatatcttgggattgatacttttactggttatgatttagtgaagtcgcaacatatcaataatatgcgacaaagtgctactaaacctgagctcctaaaagttaagaagttcactgataagcactacgctccggccaatccacaaatgtatggaattgcaaagggtcgtaacgtgattattattcaccttgaaagtttccaacaatttttaattaacaagaagatcaatgggcaagaagttaccccattccttaactcgctttataacggtaaggatgcctactcgtttgataatttcttccatcaagtcggtcaaggtaagaccagtgacgcggaaaaccttttagagactagtacatttggattgccacaaggatctttatttgccacactagggagtgacaatactttccaaggtgctcctgcgattcttaatcaacgcgccggttacacgagcgcagtcttccacggaaacgttgctagtttctggaaccgcaataatgtatacaagaatttaggctatcagtacttctttgatgctagttattacgatacttctggagacaaggctaccggatatggacttaaagataagttattattcaaaaactcgatcaagtatcttcaaagtttacagcaaccattctacgctaaatatattactgttactaaccacttcccttacacgcttgatgatgaggataaagatccaaacttccaaacaactaataccggggacagtaacgtcgataattacttcgtaacagctcattatcttgatcaatcaatccaagaattctttaactatctccaaaagactggtcttgataagaaatcaatcattatgatttatggtgatcattatgggatttcaaacagtgaaaatacttccttagcaagtgttcttgggaagagtgcagatgattggactgactttgataatgctcagctgcaacgtgtaccactaatgtttgtcattcctggtacgggtcacggaaaagtttatcatacctatggtggagaagttgatgttcttccaactctccttcacttattaggaattagcagtaaacgctatattcaatttggaaccgatctcttctccagcaagcataatcaagtggttgccttccgtaatcgggattttgttacgccaacttatacgagtgtgggcggaacaatttacaataataagactgggaaagaagctaaacttaccaagaagcagcaagagaaattaaagaaggatcaagattttgtaaatgaggaattaactctttctgattcattaaatgaaaagaatctcttgcggttctaccatccaaaagggtttaaaaacgttaacccagctgattataattattcaaatggtctaaaacgagcgcagcgaatcgagaagaagaaaggaattaaatcaacaagtatttactcagaaaacggtgaccgttcaactgtagatgactacagcactgacgcccctgagcaaagccactcttccactgattccaaccgtattaagatcactaacccagatgctaataataagtagtaagggtacaaaatagtatagtagggtctaggagagcactgtgttctgcctaggctctattttttaagtttaagctaatttcaatcagctaaattttctctccattaataaaagtgatattattaacttgtacacaaagaataatggagggatttttatggttgaagaatttggctcaccgtcgtcttacatccaaggcaaaggtgtcctttttgaaagtgataagtatcttaaaaactttggcacaaaaccgttattactggctggcgaaaccgtctataaaattgtaggtaagcgttttgaacaatatcttcaagaaagtggttatgatgttacccgtgttcaatttaatggggaatcatccactaacgaagtaaaccgggtcacagaaattggtaaagaaaataatgtaaccgtcgtttatggtcttggtgggggtaaaacagttgataccgccaaagcaattgccgacaatctccatctacccgttgtaattatgccaacgttggcttcaaatgatgcaccttgttcacgtctctcagtaatttatactgatgacggtggatttgaccattatcgtttctacaaccaaaatcctgacttggtcttagttgatacacaagttatcgctaatggtcctgttcggatgttaatttctggaattgctgatgctttagctactaatattgaagcacaagcagttgccaaagctaatagcgatacaatgcttggtgaaaaacaaacccttgttggaaatgcaatcgctcagaagtgtgaagaaacattatttaattactcacacctagctgtagctgatgcagaagcgcatgtcgttacaccagcattttctaatatcgttgaagcaaatacactaatgagcggtctcggttttgaaagtggtggtctatctggtgcccacgctattcatgatggcttaacaattttagaagagactcatgatttaacacacggtgaaaaggtcgcatacggtaccttaacacaattaatgttggaaggcgctgaccaggaacgttataacaagtacttccaatttattctttctttaggtctaccaactactcttgctgatctacatttagaaaatgtcactgatgaagaattactcaatgctggaaaagccgcctgttcagaacaagataccatggatcgtttaccatttaaggtaacaccagatgacgtggctcaagcattacgagcagttgatgcatatactaagcaatatttaaatagtcaccattgtcatcatagccagatgtaataaaagggagcgagacagaagtcacttgtgacttcgtttttcgacgcgaagctagcctctgggagccccccgcaagcaacaataggcctctgacgttcggtttccggacgttagaggccattgttgtactgcgtatttgctttttatgaaagtaacttaacttatgtcacagtccctttttttgttatttaccctataagaaattaattaatgctttatcaacttgagtattattatgaagttttgaatgttgagtatcttttcctgttatttttagaacacggtatgactttgcccgagcagccactagatacttaagtgacaatgaagatacattatcaacagtaccgtctgaatgattaccaacatcaccaataatattaagaacagctacttgacctttcggataagtttgccgtacttctgtcatttgacgatatgtggcgttcatttcatttggttttccgtctttatttaatttcattccaactggttgctggatagcagcaggtacctgtttaaaattcaatccagcaaaatgacctgcgatatcaacctgtttttgtaattgaggcatattctgatttttaccgttttgcaacatatagtaaataatcgaaatatttcccaggaaatgaccaaccatattaatcttagttatgcgatatcgtttctgtaatgcttttacaacatttgtcgcatattcgccatgcttattaaaatccaactgcctattattatcataattcacctcaacaattggattaatgacccctttatgcattgaaccatgaagagtaacttttccgttattagtaacatcagctcgcaggactatgctcgttaccccggcttttttagcagcatttaccatgtgttcttctgcatgataactactacctccaccacggaaaaatagtgttggcgttgttgattgcatatatttactatgtttttgctgacgccaaactgcaccaccaattattgccaagataacaattactatcactacaccaatcccaatatggctttttttcataattttcacccgcttttttatttacctagattataagcctaagaacaataatgcagtcaaaaattactttaatgtagaagacgttgccaaaagtttccccgtcgaacatcattagcactatatagagagtaagttaatggttcaccatcaagcgtttctaattgatcactcgttatccttaagttgccaacacgttcacctttccagataggtgcttctagttttttctttttatattgtgttccaattgtataattcgtttttgtatcgtaaggactccaaatagttacatgttgtggcgtgagtttcattgttttttcaacaccattagctactttacgtgttgttactgatgatggaacttttattttttgtaaatggtcctctgtcttaaggatcttatataaatcctgcgtagccttaaatcggttgtctttattgctcccttttgaatgtaaaataacagtaataatgcgatgtccttgatacttacctgtacttgtaaaacaagctcccgcactgtcagaagtccccgtcttcaagccatcaatcgttaccccttttacagcgtactgttctcccggtaacatcttattaagattttttgcagtcttaacttgatcttttgctatttgaaattttacttctttttgtgctgtaatttgcaaaagttcaggataatgttttacaaagtattgcgataaaatggcaacatcacgtgcactcatcgtattagcagcattattagggagatccgctaacttaaaacttttcatatctccattatctaatccaaccgaattcacaatgtttgtcttagtcattccaatttttttggctttttgcatcattttaagattaaattcatcggttccatccccggtagctgttgcaagtgcgacagtcgccccatccgctgactttacaagggctgcattgattaatgtccgaactgaataagattgaccagattttagtccgattgaagaataagcagcatcattagaaatagccgcaatttcaggagttatttttacttgagtatcccatgaaagttgcttttgttggatttcatcttctattaccaaaatagttaataattttgtaattgatgccacgggaagagccttatctacattttgcttatagataatttgccctgttgaagcatcagccatgatcgctgcagaagcatcaattcgattatttgctaacactgattgacttcctaccattagcatcatgaatagagataaaataaaaactgtcaactttttcataaaatctattctcctattttcttcaagtacggtaagataaacttaataataaataataaaggaattcattatgaataaagaacttaaatcgctgcttttcatctcaactggtctattccttatttttgttctaatttttaatctttatacatataatgctgctagttttattccccaagctagcaaaacaagtcaaattcttagtcaaaatcggcttcgtgctcctaatattcaccgttcctctgaaaattgggcataccctaagatcggtaacgctcctattgaattgatcgccatcaaacaagcaaaaaggattctagttatcaactcaaataagcgccaagttatttacattattcacgcacagattaatctaccagcacaaaaaaattctttccgcttacttcacgctcgggggcagcaaatttatcatattaatggttcccagcaagccatcgctaagaattggttaggaattactaatgggaactacattgaaacccccgttacagatatgaataatcatcaggtctcacgaaatctacgaaaagcacccaaaattgaaaatactatccaggtgtcaatccccgatgctaaatggctgcaaactttacctgaaaacacacccttaatagttaaggaggactattaatatgatttcacgcctaaaacatggacggttttttaatcacttacttggaagtaatcttattttgctaattataattagcttttataatcttcttacatacttcatcccattaatcaaaatttcaatcattcaaataattttattctttctaataattgacctactcttgattatctttaagattttagcgctatacaattagccgacaatctcaatcttagtaccaactggcaaattcttttccatccattgagcgtctggcactgaaagccgaatacacccgtgagaaccctgtgtttttccaagcttagcagcttcttgttcattatattttccatctgctttagtcggaacactatggaacaagtattctccatgattcttccaagaaacgtagtaattagctccctctttcaacgattgattaaagaagctatctcctcgctcttgctgagcataaaatgttcctgtcggggtcacacttttcagtttaccagttttaggatcctttttataaattccacctgtgctatacattgtataaatgacttttgaaccatcatacaaatatgtccgattattttttaaatcaactttaatccaaaagtccttcactttattcaaatctggatacggaactgtttccgaggacttatgccaatcaattggggttcgcatatgactttcactattatcgattttcttttcttgtgttggtttttcttttacttgcgattcaactactgctttttggggatgggcattcgaagtagcacgtaattctggaccaattgcaattattgctactaataagcaaaatattccataaatccaatgcttcacttgtaagttcaaattaatttctcctttacagataattcaaaacatcactattataattatagggaattttttattcaatatactttaaaaaaggtgtacaaaatgcgggataatcttaaagtttcatacttaactgctatctttttctttattgttgctatcatttatgcaaatcttgcgtaataatcgtgaggattctactatgacatcatttttttcattcatatcaaatatttggtcgtataccatcaaccataaatggtcaaaggatattttacgagccaacatcctttttattcttttagttattgtttacgatctttttcacttttcattaaaaataattaattggcggatcttttttaaagtatttctgctattaaatatttgtttgttttttaagttccttttagatggtattgatcgctatttaagaacacggtaactttataaattctttattgagttatcaattttccgtgctaagataggaacgtaattatttattttcgatttgaggaaggtacaatgcattcatatattaaatactggatagcaggaataggagcattattaattataatgattgcggggatgactgttcaccagaaaaatcatttcaataaaaacgtaaccatcaataacattgccgtgggagggctaacagccaagcaagcttttgataaggtaaaggggacctcaggagcaaccaaggtatatgttgacaataagctagtttaccaaactaaatccatgaaggctaattttagcaataatgatgaacaaaaatttaatcaagcactgaaaaagcagtttacatttttcccatcacataaagcaacgaacttatcaataaagccagataactttgatcaagattcgtttaatattgcgaaaaacaaattaactaacgaggtacatcaactcaacacaagtcgtaaagctcccgttgatgcttacgcggtctaccaaaataagaaagtttctgtagttcctgcagttaagggtaataaatatgatttaccaaacgctgttaatcaactaaataatcaagccggaagtactaaaattaatattactttacataaggaacagccgattgctgcaaatagcaaaaccgttaagaacgaggaaaaacagttaaataagttaaaagggaagaaagttacttacctcgttcaaaatgaaaagtataacctcactaccaatcaaattattacccgggcaacctatcaaaacggcaagtatcatttcgacactacggccttaaataaacaagtaaagaaaatcaatgagaaacatgcaactcttgataagccatttaaatttagaactcattctggagcagaaattaccactacagctaatggttcctatggttggaaaattagcgagaaaaaagctggcaattcattaactaaagcaattatcgatggccgccaagaagttgatggcgagcacgatattgaaggaaaaggctataacactgctggactcggctacaatgttacatccaataatggtattggcgacacttatgctgaggtttcattagctgaccaacgagcttatttctacaaagatggtaaatgtgtccttgaaacagatatcgttagtgggactaataacgaaggcaacaaaacgccaaagggagtctggtatatcatgtaccaacaaagtccttccgttctccgtggacaaaacgatgacggatcaagttatgcaagtaaagttaattattggtcgccgtttactttaacgggatgtggcttccacgatgcaagttggcgtcacaattggtccaagactgcttacctaagcgatggttcgcacggctgtattaatatgcaaccaagcgtggctggccaagccttccatgatttaaaacaaaatgaacccgttattatttattaatactctagggagcgagacagaggtcacttgtgacttcgtttttcgacgcgaagctagcctctgggagcccccgccaagcaataataggcctctagcgttcggtttccggacgttagaggccattattgtactgcgtatttgctttttataaaagtaacttaacttatgtcacagtccctattattttaaaagaacgcctaaccggactgtggtgaaaaacttgcaagctaacttatttttttattctcttaattaatatatacgtaaaaatttccctttgcacctcataattctaaaatagtggtacagtaaaaataaaccttaggaggcttagattatgactgataaaattgttacttcagaagaaatgcgacattacgattcttacaccattaatacaatcggtatcccttcccttgtgttaatggaacgagctgcattagccgttcgtgatgaaatcttgcatgcttttccaatcgcgctaaaagatgtggtagtagttgccggtagtggaaataatggcggggatggaatagccattgctcggttgctgcatcttgctggtgtccatgtaacaatcctcaatataggtaatcctaaacatgcgtctgctgaacaccaaacacaagaaaaaatcgcgcaatattatcaaattcccgaaacctctgatctcgctgtccttaataaggcaacattaattgtcgatgcaatgtttggaatcggaatcgatcgtgcagtaaaaggagcttataccgacgcaattaacgccattaataacactgatgcagttgtcgttgcagtagatatgccatcaggaattaatactgatactggagaggtaatggggactgccgtcagagctactacaaccgtaactttcgcctataataaagttggcttaaccaagaatgccggaaaagattacgcaggaaatattgtcgtcgcaaatgatatgggaacctatgcagtagactgattggaatattatttaccgagccgttttactattaatcgctgaatattaatattattataataagtaacgaacgtttcagtgaactaatttggaggtaaataatatgtcagaattaacaaccaaattatttatagacctaaatttcaagaataagttagccactggactcaaataaataatactgaccaattgattattggttgatggagctgtgatatctcttggtagaaggccttacgatagatatccattgacgaatgtccattaaacatagctcgtggatagtgattcatccaatcattagtcgctatgatctgagcactactatagttatttatagcttcacctttggtaatctccttgcggagaaaccggttattgatctcattggatccacgttcccaaggggaatacggatcagcatagaaaacatgatcgtgaacttgtgttaactcactaaattctgaaccgttgtcagaggttattgtcttaaagatgcgatagtaagcatctgtgcccattttctggcgtaaatttataaagaactgatttactgcatgcgcagttttaccagcaattttactcgtgatattaactcgtgaaaggcgatcagtcattactagtacaacactgtcattaccgtttttctgtccctgaactgtatctagttcccaatggccaatttcggaccgttggtccgcagtttgaggtcgttgagcaatattaggacctaagcaccttttagcttgcggatgagttcgatgatgcttacgtttaggcttttcaaagaggtctaaattggacgtacgaagcacaccctcattaatccattgatataaagttacaaccgactttgggatcagggtgccatcattcattaaatctcgagccttataaataaccgcttgtggggagtaatggtggtcgtcaaactcaccaagcattagctgatcagctaatcgtaaaaattgctttgaagaataatataagcgacgacgaccagaatggcggtgatgttcaagatatgtggcctgaccagcttcataactatagatgtagtaagaatattcgtaaatcttaccattagatttttgacgacgaagttggcggaccgtaccacggttgagctcgttattaattgtttgatgattaactcctaattggcgaccaattgcgcgattggaaagtccttgcgactttaaagtcgcaatcatcacacgttcttctttagtaagatgagcattctttttatgagtagtcaataaactagtagacatggtatcatttaagtgcgtcatttgacggacatcctttcatataggtttggttcacttaatatgatacctgatgtcacgccgaatggcgttttttatttaccaccaactgggtggctaacttcattctataatccaccaattatttatagatgttaaaaattttgaaaaataccaatcaatgttaaagtgccaagtacacattgaagaagaacgtcatggtgattattgcttaccgggttttcctgatcgtcacaatttccaccgccttctccggattttacgtaaacatgatgacggtttaactagcaaacaactaatttatgacttcgattaccggccaagtgacctcgaagatgctactaaagcattagtaacaaacaatttgtcaactactaccccaattaacgaggaagactacaaaattcaacttaacactgaaggtatcgaagttgctgataatctgctaaagcgccgtgacaaaattgctgaagctgcttaccacacattaagtgaaaatgaacaacgagaattagaccgtcttgtaaacaagctaatagaggattatgcaaaccgcgacgtaaattacaacgcccttggaaatatttgccgttaaaatataatatcctattcaaaaaaggcagaggctaagagaatttttttctatgatcccttagtttctgcctttttagtagcgacaagtcttattaagaaagtactttcccgctcactttcaatttagttattttaaatattctgctggatttgctacaaaatcgctaattttaatagttgttgcatccttagtagcagcattctttaattggaaagttccttcttcaacttcacgagcgccaaacactgcaaagtacttcgcattacgacggaaagcttctttgatctgcttaccaacttttaccccactgtaatctttgtcagccacaatcccttgctgacgaattttactgaggacttcaaatgccatttcatccccttgctgatctgcactagcaaagaagacatctagttggtcttgaggagcaaatgcaggattttcttcttggagtaagagcattaatcgttcaacacccattccgaagccaattccaccttcttcagggccaccaagttggctaatcaacccattataacggcctcctgcacaaacagtcgtgtacccaccaccaaatactggtgagtctgacataatttcaaaaatagtatggttatagtaatctagaccccgcaccatattggtatcaatttcaaaatcaattcctaatttatttaataaggcctgcacttcgtcaaagtaagcttgtgactcttcatcaagataatcaaggattgatggagcttctgcaacaatcttcttatcgccttcatctttactatcaagtacacgcaatggattcttatataaacgttcctgagagtctttactcaattcatcatagtgaggcttcaagtaattaattaatgcttcacggtaatcttcacgaacttttttatccccaagagtattaataaccaatttaacatttggcactccaaactttttaaagagcgccattgccattgaaataacttccacatcaatctgtggtgactcattgtttaatgcctcaaccccaatttggtggaattcacgttgccgccctgattgtggacgttcataccgaaacattggccccatgtaataaactttataaggtttaggatattctggaccatagagcttattttctacataagcccgtactactccagctgttccctcaggacgcaatgcaatatgacgatcacctttatcatgaaaatcgtacatttctttttcaacaatatctgaagtatcgcccacattccgtgaaaaaacatggtaatcttcaaacatcggtgttcgaattccgcgatatccaaactggttaaaaacttcgcgcgcattttgttctactttttcccaaatacttgtagttcctggtaagatatctgcagttccctttggcttttgataatccattaactgtgtttcccctttcgttacgtataaaaacaaaagccctctaagaccttaacagccttagagggcgatattcatcactgttccacctctatttcacagtaacctcacagtcactgcctcatggagttgcgttaactcctgatgataacggaatcaccggaacagactactaaaattcatcctttcagctagtagaggtggatcatgtctgctcccagctctcaactcaactggatctctgtcaattacacaggcactttgtttctacgtcaatgcttttataatacattagtgattttaccatagcttacagattttgggtatcatttatctaaattaagccgccgttgaactcggtgtaaataccataaataaagacagataataatcagagtaccggtcattagacaaaagactgaaataaataaaaattgataacttcctttttcaatgacaaatccaccgtacaatggaccaatcgcacgtccaaccgacatcataatattaagcaatccttggtaatgcccagcttcgtcgacattagtcagttgagcaatccaagcaggtaggccagcaaaactagtcatttcaccaattgttaagattacaaaatcaataacaaatgctgtcaaagtccgagcaaaaattaacaggaggaaagatagggcaaaaataaagattcccacaataatttgcgttgataaacgaacatagggacttaacttattaacaagtggttgtccgataataattagcaccccattcaatgtccataacatactataggcatagaatggaatccccatgtttgtcatatggactgccattacactttcccataaggaataacttaaatgaaccgtaatatagtttatgagaataaaccaaaccaagacgatccatcgcgaatgcaattggcgggaaacatgatagtgttcttggatctctgaattatttttaattgcatctacagccacattaaatgttaaaacaactactagcattaacaaggcataaaagattgttgctacagcaaaaactaccactacactaatcggtaaaagaacacccaccagcaacgttccaatcacaactccgatattaaaggccatataaatataattaaagacataacgggaagaatgatcactgaccaacgtcccataagaattaacaatcgtggcattgattccatccccaaagctgttaattgtaattaggacagcataccatggccaatcatgaataaagatcaataagaatattgctagtgttgagaggctaactcctaaaatagctgtttgatattgtttccaatggtcaaataaccaccctcccaaataatttcccatcatcatggcaatggacattattaacatcacaaagccagcagtcgtcagagtttggccaaggtaattatgaagatacatagttgtaagcggccataaaaaagctgcccctgtgttgtttaacagacttgcaagggcaacccattttaattttaccgtttgctgttccattttaacgttcagataccatatcagaggaaggtacacgtaaaagcgtataggttacagcactatgatttgcttttaaccctaaaccattaatagcagtatttttatactttacatccattaccgctgcaaaagcatggcctgttttggcatcctctttttccaattgctttttatcccatggcaaagcactcgcatctaaggtaactatccgcgatccatcagcaaccgatccataccgtgaatttgttgtatatttatcatttccagcccagtacgtatacgacacaattgggtgcttgccgcttttactacgcgtcgctaaaacataatagaaatcatctgacttatttcccatttgaagtggacgataagtgattgaagtctgtgtttgttgatgattattaatgtcaactggacggaaaaatgtgagatatgacatccccccgagccaacataacgagacaactaataagatcacataacgaatcactaaatttaatttaaatactttttttgtcttcgcaatcagcattaattgtttaacacggatatagtggattacataacaaaaaaaggcaattgcacatatccacgatagccatcctagccaattccaactcataattttcaatactccattctctaaattatttactatgattatcacacaaattgattcacttgtcgttaaatcttaataacaaacaaataaatttaataaaataactacaaggataagttcaaactgtgctaaactaatttttggtaacaaactgtgtcttgatttagaataagagataaggttagtattatttaataatatacctactaaggaggaatgttttcatggacaatttgagtgagcttgctcaaggattgattaactttgagcgcgaaaatgacttaaatgataatgaagttgctttcggcagtcatttatctgttgaacgaattcacgaaattaaatcatccaatactccagtaacttcagaagaagtcgaattgcttcaacggttcatgcaaagtaagtaacattaccattcataccattgtagcaaaatcaaagctaaatattttctaaagcagaactaataatatttctctgctctaatctaaaaaggacctagaagaaaacattactttcttctaggtcctttttctgcttattttggttgataaaattcaaccggaacaagtttagtttctatcttttcatgaggtgtttctattcgcttcattaaggtttcaattaattcttgtgccaacaatggaattggttggattactgttggaagataaggcgctacttttcgaattaattgcgagccatcataacctgtaataaaaaagtctttatttatttgctttcctgcttggtagtaaagattgctaatcgttaatgcttgaacatcattagaagccagcaccccatcataattaccaggaaacgtagcctcaagatccaaatgttgaatagctaaaggttcaaaatctcgtttctgtttattcaaaaaatcaagtgccccttgaatccgattgatggtaggtgaaacagatgtatcttcatccacaattaccgccaagtgttttacatcatgttctaccaaatacttcgctgctaattcacccccgtggtaactatcagctgcaacaattgggatattatcggcaagatatctgtcaaaagaaacaatgggagcagtaagttggtgatattcctctatccccagattatgagaacccgaaataatcccatctacttgatttgccatcaacatatttaagtattcatgctctatttccggattttgtgccgatgatgcaataattgttttataaccctttttaaataactcatgttcaagctcatttgctaattctgcaaaaaatggattaattaaattaggaaaaattaagccaacaaacttagatggtttcccttgcatcgcccgtgccaaggcatttggttggtaattcaactctcgcatcgccgcatggaccttatcaatcgtcttttgacttaaagaaccataattatttattactcttgaaacagtagttactgagacccccgctaattgagcaacatcttttaacttagcaaccattctaaaactccttgattaatttcgtttaagttattccattattatagctcaccacatttgaacaatcgacggttactttaaatataattttaatcgctattttcacaaaaatgtgttctattacatatgtttaatttatcatttatctaaaaatatttttcatttgataaaacatgttttgtgaagatgataattattgattttatgatattttctccccagttttaaaggatttcacttgttttttaccttcaaattaaattgacgctaaagagaattaatgctagtttataggtagttgaatctttagaacttcttaaactttttgacctttttgatattattttaatttatgaaataattaataagccacttttaggagtaatgtttaggaatttcaaatataacttaaggagtccctgccaatgaatcgtcaatctaataatgatccatcaacccattttaaaatgtacaaaagcggaaaaaaatgggtcttcgctggattaactgctgttaccttattaactgctagcggcgctgttgctcatgctgatgatgcttcagtttcttctgcagagcctgccgccgctactactgccaatacacaaaataatacaaatagtaccgctgattcttctgctgccactcaaagtacatcaaacagcgcctcaacaggaaatagtgctacttctaatgccagtcaaactgttgccagccaaaccgcagctgattcagctttagcacaatctgctgaagctaaacaagctgctcctgctgctccaaaggctgctagtgccgttgctacatcacaagagaactcaataacagatttaagcgccctccatttcagtaataacgcttcacaacaagcattcatccaaagtgttgctcctggtgcaatccaaggatggaatgaatacaaagttctcccttcaattacagttgctcaggctatcgttgaaagtggttggggccattcggccttatcaacccaggcccataacttatttggaattaagggttcctataatggaaattcagttgtaatgcgtacacgggaagtttatggtggccggagcgtttacgttaacgccaatttccggtcctacgctaacaactccgaatcagttactgatcatggtcgctttctcaacgtaaatagtcgttaccgtaacttacttggcgatactaactatgcatctgttgcaaataagcttcggcaagacggctatgctaccgatccaagctatgctagtaccttaattcgttttgttcagacatataacttaaatcagttagatgccgttgccctttctgggaaagttgttacgaataagcaaactgaaagtgctcaaactcccgaaactaatgtaactgtttcaaacactggatactacacggttagaggcggagacaccttatcacgcattgccggacagtttaatacaactgtaaataaactcgccaccttaaatgatatccacaatgttaaccgtatttatgttggtcaacggctcttggttcgtcaacctgctgaacaacaacagcaacaaacaacccctaagcgaactgaaaccaatactaccactaatagtaatacatacaccgttaaaagtggcgataccctttcaggaattgctggtaaatttaacaccacttatactcaattagctcagcttaatcatattagtaaccctaatgtgattcatgtagggcaagtattaacgcttcatcaaactacagctcaaaatactactaaccatcaagaaagccagcaaaataaacaagttactactagtgctaatggcacctacaccgttaaaagtggcgataccctttcacaaattgctgctcgttttaataccacaacatctgcattagcttcaactaaccatattagtaaccctaatttaattgaagttggtcaacaattacggattaacaatagtgctagtgctcaaaaaaccacttcacgccactccaatactaacaatggaaattacgtagtccaaagtggtgattcattatcaaagattgccgcttatcatggcttaaactggcgatcaattgcagctaaaaataacattcaaagtccatacacaatctttgttggacaacatttatcactttagtcaaataaccattaaattattatatgatataaagcaagaagtataagaaaatctatgcttcttgcttttttgttttaaaaaaattcttttctgttctagaataaaggtaggcagtttattattaatattcactaaattactattagggagtttatagaaagtatgtgatatttattgtggtagaccgttggacaacagatattccaaatgttaataaaatcagtcaattatttaaattactagggaatcctaaaagattacaattattatatttgctgattcaacattcaatgagcgtttcagaaattagtatgaagttgaactgggaacaatcgggggtttctcaccagctgcaactattgagaaaatataatttagttcaataacggcgagaggggaaaaccgttatctatcatttagaggatccgcaggtaatgaccttgatcgctgatgtattaagtcatgcagaaaaaatcatccaataatttagtgaatattctttgggatccccccattgaaataaaagaaaggcgtttagaactcatcctaagtcaaacttagacgatgacttctaaacgtcttttcgttagttaataaacttaatttctaatcgttcatcttccaaaactccttttacaatcaatgacttaccatcataaaactgatgcttatctaaccaaaatccaagatgggcgtgactataaaacttaaaactataccgcattgcattattcagtttactaacctgcaacacaccttgtgagccatcggaacaagtaatattttgtgattgattattattatgaacataaattgttgtcattcttctcacctccgtttttattatatctcaattttggactaccaaaaatatttttaagcaaaacaaaaaagcaacaacttcagctataggaaagttgttgcttttaaactaatctgcagctaatgcatcgattggattaaggtttgccgcccgacgtgcaggaagcaatgcggcaataaacgaaattacaatcgcaattacgattgcaaagattacatttccaacagtaatttgtacaatattatatttaatcaagccatataaagcgtggttaataataaccgttacaactgcaacaattagcagtgcgagaattgcggaaaacagtccaataaagacggattcagacgtaaataatcggcgaatatctttttttcgctcacctagggctctcaaaataccgatttcctttgtccgttccgaaactgacatgtacattgtcacaataatcattaatgcagacacaagtaatgaaattccagcaattgaagcaagaaccgtggaagcaagactaacataagtattaatggttttaaggattgacccgactgtaatcgctcctaatatccgtttgttattactaccacgaagattatcgatcttattcgccactccttgaacactgtcaagatttgttacattaacggttgcaaagttagcagcagtagaggcattcgctttttgaagcagcgcacgcatagtggaataagtaattgaagttccagcactcgcgccttctgtaatccctgccaccttgaagtttccagaaacgggaactggattattattggcatctatccatgtaaaggagagacggatagttttaccaaccatttgcttataatttttagcacttgataattggattgcttgttgctttgtaagaacgatttcaccattcttgggtttatgcccctgtttaattgaatcactagtaattgccttactcgaggtacttagtgaagtcccactttgcttttttccattataatcaagctgaaaggcgctcaccataattcccggctggacagacgacacattatcaagctttcgtaaccggtcaatattatggtcactaatcgtcattgattgaggattagccgccatcgtttgtcctaacgatgattgaatttgttcctgggtcatctttttaccagttgtgtttttaaatacggtaattgcctgcggattagcaagagaattaatctgattttgaatgtacccatttatcccattacctaaaccactaaacaagagtacggcaaagataccgattgcagttccaagcataattaacgaattacgccaaaagttataggtcaaatgtttaaaagccgttcggtagctcgccatcgccggtaaaactcgtggagtaatctctgttgggtcttctggaatcggataagcaggacgcaatctttcatcgccgtcaatttttccatcagctaaatgaacaattcgtgtcccattatccgctacttcctgggagtgagtaacagcgatcactagtttcccatcacgagcaatttcgtctaataatgctaatacttctttggtattctgtgcatctaaggctcctgtaggttcatcagcaataataatttgcgggtcacttgctaatgctcgggcaattgctacccgttgcttttgacctcctgacaaatggttcggatgcttttttacttgttcacttaaaccaaccttatctaagagttccaacgcgcgctttcgccggtcttccttagtcaacgttgtcatatccaacgcaaccaaaacattatccagcaccgtcaagtgagaaattaagttataggactgatagatataacccaccgtcgcgcgccgatagctatctagttgcttttcttttttatgatcgaggattttaccatttacgaggacttcaccttcaaagttacgatcaaggcccccaatgatattcattaaagtggactttccaccacctgattcaccaaggatggatacaaattctccccgatcaaactgtaagtcaattcccttaagaactgggaattcctctttgtcaagataatatgatttatatatgttttttaattctaaaaaagccattgcatcctcccctttactatttatttagtctgtttattatagcaaggttcgttatgaaaaaggtttttcgctcataattctttaacattatttatattattggtctggagaatttttacttaatgtaagtttcccatcagctaactcgtaaacattatctgcatattcacgcaaacgtaaatcatgggttacagcaatcactgcttttccttcctttttagccagatcttgaaataattgccccactgtctttactaaattactatctaaggccgctgttggttcatctgcaagaattatctcgggattggtataaagggcacgtgcaatcgctacccgctggttttgacctcctgacaattcagaaggatattgcttgagcagcttctttattgcaagcttttccaataattcatcaaaagcttctgatgagacgttcccattcttctttatgcgatcaacaagcttaaattgatccgccacatttagatagggtaataggttatacgactgaagaataaaaccaatcttctgtaagcgtagttcatcacgttttttagaagataatttctcaatatcaattccatcaattaatacttttcctgaagtaggtgtttgcaaaccgcccgcaatcgttagaaaggtactctttcctgatccagaaggtcctaaaattaaatttagttctcccgctttagcagaaaaactaacatccttaagaacatggacacggctaattccttcgccataatatttgttaacgtctactaacttcaattttgacataacatttgcctcctcaccttaatttaaggcctgtactggatcaatcttaataatcattcggactggtaataacgaaccaatcattccaagaactattaatcccactgccattaaactaattagtggccaattcataataactggtaccgacattggaatcgctacacttgtaataagggttaaaagaatcccgccaattactccacaaaccattaggaagattgattgagtaactgtcgcaataattagatgacgagcaggaattccttgagcgcgcataactgcataatgacttattttttgcatggtaagaatatataagaagaccgcaattacaattaacgaaattaccattaagaagccaatcataaaagtaaacgtattattttgcgctgaatatcccggtagcttattaatatattcgttaacagtgtagtgttggagatcagggtaggtatttttactaagcttattgtcagaaaagagtccgctagcaacggctgaactatttaatcctctcagttcccgccaaactggcaaactaccatatataacgggggcaacgctaaatttagcatcattaacaaagccaacaattttatatttctcattttgagaattgattgttactcgatcccctaaatgatacccctttttgcttaaactcttgtcaacaacaatttcgttatttcccttagcttgacggccacttgtaatcttaatcttttcccgggaaataaattggtcaggatctaaaccgataaattgagcactttctttacttgctcctttttctttaagaactactggtgcctgaccaacaagagcaacattcttttgatctttaccagatagttggtcacgagtaataattgattgtccaagattatcattactatttttatttagaaaaacagtttccgtaccccactctttaatggcggcatcattttcattttggagtcccaacatcatccccattaggaaaaacattaggtaactaattaaaacaatcatggcaacaattaatccataatgcagcttttcatgtttcatttcttttagtgctaaaaacatattataacctcctactgcaacaatgcagtcagtgccttggagagccgttcaattgcttcattttgtttatcaggttgaagaaggcaatccttaatcgtttcatgactcaaaaccattacactccattcttgagcactatgaatcttaatttgcggctgcgtattatcacgtaacaatccttcatttgtttgaaagtgcaaacgcataaaatcacggtacttacttccgttgatctcatcaacaaaagctttaatctgattaacataatcactcgcagctaaaatatggtttgcacgggtaattggtgtatgaatttctaaaattgccacttgataaagatactgatatgcctccgttaaatctgtaaaatatttataaaatgctcctctggcgattcctgcttgttttacaatccgtgcaacttgtgcacttgctaagctatgttgactaaattctgttagtaatgcattagtaataagttcttttttctgtagatttaaattttcaaatgttgtacttggcatcttaattcctccaccgcatcgtgacaccgtgtcactatgaatttattttatattatcgccaaagtgacaccatgtcaattactagataaaaaaagcgaggcgaaaaattttttgcctcgtttttaatatatttaaatttttatcttaatctagaattaagcttcttcgccgccaaccttaacaacagcttttgaaaccttacctaatttaccactaacaaagtcttcaacaccatcaaggtctaattcgtgtgagaagagtggtagtgggtcaacaacaccagaagaaagaagtgcaattgagtcttcaaaagtgtaagggttaatgaaggccccttgaattgtaagttgtttttggaatacatcgtaagtgtttactgagaacttgtcatcagggttaccaacaccaaacattaatacttgagcaccacgagctgcagctgcaagtgcttgttcttgagtagctggcaaaccaaccgcttcaacaacgatgtcatatgcatcagcaggaatttcttccttagtagtgttgatagtcttaacgccgaagtgcttccggttgttttccaacttttcatctgaacgaccagctaaagtaacttcgtgaataccacgagccttcaagatttgtgcaaataattgaccttcaaaaccatcacctaatactaaagccttttggtatgggtgagtttcaagtaagtcaacaccgtgcattgcacatgaaattggttcaacaacggcagctgcctttaatgaaacatcatcaggaattgggtaaacaacttttgcaggagcagtaaagtattcttcaaaaccaccgttacgggtaacaccaacagcatcaaggtgttcacataattctgggcgttgagtccgacaatacttacattgaccacagtagatgttagggtcaacggttacacgatcacctggcttaacgttagtaacttctgaaccaacttttgtaactacccctgagttttcatgacctaaaacgataggaggaacagctgatgcagatcccggaagaccggcatagagcgctttatcagtaccacaaataccagcgtaggcagtatgaattaagacttcatcaggcttaatttcaggttctttaatatcttcaatttcgagttgttttttacctgttaaaacaagtgccttcataattaaaatacctctcttgtgaattttatcatttgtcaagtgatagtatagtgtgaaaacgccttaattgtcaaacgtccaacaattatctcacattcttttcgccatcataaaacgttaaactcagcaaatccgaacctaaataaatcccggtatagaagcattttctaaaaaagtgcaatttttaaatatttttttcttcactaagtttatgctatttttttgttatcacataaatggttttactttcattttttaaattacataatttcacaaggctttttatcctatttagcgttttacatcaagaaataaaatgtttctacatataaagtaataaattctaaatttatatagaaaatttctccaactttcagaaagcgcttaactaccattaggcacgccaaaacttatctccaaccgctcctcaaaatcgcccaaatggccgttataacggctattttccattgcaggatatatttttttatgttaccctaacaaagtattcgaacttagttaattatgatttccaatctaattaacaaaactcaaacgaaaggtggatttggcgtggacgacacaaagaatcaacaccggaagcataaacttattgaatatgctaacggtaaatcactagaggaaatcaacggaacagttgaagttcctcgtggaaaaggcttctggcgaacattattcgcttactctggtcccggtgcattagttgctgtgggttacatggatccaggtaactggtcaacttcaattactggtggacagagtttccaatataccttaatgactactatcttgatttcaagtttgattgcgatgttgcttcaatacatggcggctaaactcggaatcgtgagccaaatggaccttgctcaggcaacacgggcacgtaccggtaaagcattaggtattatcttatggattatgactgagttggcgattatggctactgatatcgctgaagttatcggggctgctattgctttaaacttactgttccacattccgttgatcccatctgtatttattactgttcttgatgttttagtactgctattattaaccaagatcggattccggaagattgaagcaattgttgcatgtttgatcttggtaatcttgtttgtttttgcttaccaagttgccttatctaaccctaactggggtggcgtatttatgggtctccttccatcagctaaggcaattgcccaacatccagaaattagtggtattactccattaactggatcattaggtattatcggtgcgactgttatgcctcacaacctatatctccactcagcaatttctcaaactcggaagattgaccacaatgatcttgatagcattcgtcaaactgttcgttttactacttgggattcaaatatccaattatccttagcatttattgttaacgcccttcttttaatcatgggggttgctgttttcaagactggtgctgttcaagatagttctttcttcggtttatatgatgccctgaataacacttctatgcttagtaatccaatcttaattgcggttgctaaatctggtgtattgtcaactttatttgcagttgctttacttgcctctggtcaaaattcaactattactggaacattaaccggtcaagttatcatggaaggtttcattcatatgcggatgcctttatgggcacgacggttagttacccggattatttccgttattccagttattgcttgtgttgctatgacgagtggtgagaataccatccaacaacacaccgccttgaaccttttaatggaaaattcacaggtattcttagcttttgcccttccattctcaatgttgccattattaatgatgactaacagtgaggttgaaatgggtgaatttaagaatagtggctgggttaaggcttgcggttggatctctgtaattgcccttaccttcttaaatctctacaaccttcctgcaacttatgaaggttttggtatttgggcaaaagggacatccgatgttctcgcatatatcacgattattgtcattcttgctcttcttatctggacttgtgttgaactctacaaaggggataagcgctttgctgctgaaggtaaaggattcggacaacgtgaagctcaaatgaaagattcagctgtagaagattaaaataaaaacctggaagcaatgctcatgtacggtaaagaagcaagcaaccgaaaacaatagatagaccgccagcactacactattccgaaccaaagaccaaaagataagcattttgagaaaatctaaacttttggattttcctacaatgccgactacggcggaatccctcccactccttatatatttctttctgtatacattaaatttgtatttagtaaaatgcagacaacaccacggatcggcttttggctggacaattccaaccaaacaccgcagcagacagtagaaaccattctgaacgttaggaagccggtatgattgttacatataaggggaagaaaaatttcttttagatacttgttttcctaaaactgatgtgatataataattcaattccagaaaaggagtaaaaaatatgcggcaagttattcttaaataaaactataatcaaatagtgggaacaaaggattatgatagtcccttttgtaggggcttagttttttgtacccaatttaagaatacttttgccttatcaattttgacatatccccaaaaacagcactcacaaacaggtgtatgctgtatatgtgtatgtccgcaaattatcatccccagtggtaaaagtattttactgctggggatttttatgcccttcggggcagtaaagggaggacaatcacatgaaaataatcaatattggaattcttgcccatgtagacgctggaaagacgaccttgacggagagcctgctatatgccagcggagccatttcagaaccggggagcgtcaaaaaagggacaacgaggacggacaccatgtttttggagcggcagcgtgggattaccattcaagcggcagtcacttccttccagtggcacagatgtaaagtcaacattgtggatacgcccggccacatggattttttggcggaggtgtaccgctctttggctgttttagatggggccatcttggtgatctccgctaaagatggcgtgcaggcccagacccgtattctgttccatgccctgcggaaaatgaacattcccaccgttatctttatcaacaagatcgaccaggctggcgttgatttgcagagcgtggttcagtctgttcgggataagctctccgccgatattatcatcaagcagacggtgtcgctgtccccggaaatagtcctggaggaaaataccgacatagaagcatgggatgcggtcatcgaaaataacgataaattattggaaaagtatatcgcaggagaaccaatcagccgggaaaaacttgtgcgggaggaacagcggcgggttcaagacgcctccctgttcccggtctattatggcagcgccaaaaagggccttggcattcaaccgttgatggatgcggtgacagggctgttccaaccgattggggaacaggggagcgccgccctatgcggcagcgttttcaaggtggagtatacagattgcggccagcggcgtgtctatctacggctatacagcggaacgctgcgcctgcgggatacggtggccctggccgggagagaaaagctgaaaatcacagagatgcgtattccatccaaaggggaaattgttcggacagacaccgcttatccgggtgaaattgttatccttcccagcgacagcgtgaggttaaacgatgtattaggggacccaacccggctccctcgtaaaaggtggcgtgaggaccccctccccatgctgcggacgtcgattgcgccgaaaacggcagcgcaaagagaacggctgctggacgctcttacgcaacttgcggatactgacccgcttttgcgctgcgaggtggattccatcacccatgagatcattctttcttttttgggccgggtgcagttggaggttgtttccgctttgctgtcggaaaaatacaagcttgaaacagtggtaaaggaacccaccgtcatttataaggagcggccgctcaaagcagccagccacaccatccatatcgaggtgccgcccaacccgttttgggcatccatcggactgtctgttacaccactcccgcttggctccggtgtacaatacgagagccgggtttcgctgggatacttgaaccagagttttcaaaacgctgtcagggatggtatccgttacgggctggagcagggcttgttcggctggaacgtaacggactgtaagatttgctttgaatacgggctttattacagtccggtcagcacgccggcggacttccgctcattggccccgattgtattggaacaggcattgaaggaatcagggacgcaactgctggaaccttatctctccttcaccctctatgcgccccgggaatatctttccagggcttatcatgatgcaccgaaatactgtgccaccatcgaaacggtccaggtaaaaaaggatgaagttgtctttactggcgagattcccgcccgctgtatacaggcataccgtactgatctggccttttacaccaacgggcagagcgtatgccttacagaactgaaagggtatcaggccgctgacggcaagccagtcatccagccccgccgtccaaacagccgcctggacaaggtgcgctatatgtttcagaagataatgtaactgcttccagttttttatttttgtaacgattctttcacaaaatgttcatacttgaacggtatagtatagacaatccctaatataaataaacccctatttttcttctatactatccccctcaaaatagctatgaagaaatacgaaaagtggtcggcccataatgagtcggccattttttaatacatctaggctcaccatggtataataaggaactagatatattactcattaagtatgaggtgaaatcattgaataataaagataataatcaaaataataataagcggcgacctactcgggttgagctttatgacactcctaagccaggaaaagaaaagaaaaaacgttctttctttaatcgtcagcctaaacagactacccctaaccataaacataagacagcatcccctaacaagaaaaagaatccatatggaatttcacgtcggatgttcaaggtcattttaggctgcctattagttatcttaattgcaaccattgttattttcttagttaaacaacaggaccctgtcaatgttgatagcaatgacactactgtctccacaagcacttcatcacgcaagaagcataaaaagagcagcagtagcagtcataagcatcgttcaagttccaatgacagtgatgacaatgatactcaagatacttatagtatttcaactcctagtcgttcggataacacgcctcaatcaagtcatccaactaaccaacaaccaactactaactcttcttcaactccacaacaaaaccaaccatcgcaggaagaacaccatgatcaaggcaacagccaacaacaatctacttcacaaccagcaagcagcaattctgggtcacagcctaatcaaagttcgcaaagtactagttcccagtcaaacccgcaaccagttcaacctcattctcaaaataatcagcattaatttggaataaaggggttgtcaattaaagtgggcgtgctataatcaagacaatcgattgaaggatatgcaccttcaaagtcctctacagagagtaagtgccttgagtggaagcacttgtgagtgacaatgatggttgtaccaccttcccttattattagccgagataaggctagtcggatcgtgtccgttaccgcaccttagagaggacattactagtgtgtcctaaagatgggtggaaccacgctaatttttgttaattgacgtccctgatactttcaacattgaaagtatcagggacgtttttatttatattaaaggagagatttctatggctcaggttgctgttatgtccccagatggatcagttaagaagatcgatcgggattcacaagaaagtttagaagcattacgtaagctttctgcattaatgttaaaggctgcattaaaacaagaatttaagggtattcgacttggtgaagctgtcgctgacgaagatggtttccacgttgattctgataaagataatcaacaagtttctgccgacgaattaccagctcttgaagacgtaatcaagggaatggcaaagaacgatgttaaggtagaatttgttgaagtacctgtagaggaagcacttgccgaagtaaaagatgatcgtttctcaactgaattgatcaatgaaaatgctaaagacggcaaagtagcaatgtaccaacttggtgatgtcaaagctgttgcagatgatgacattcttttatatggtaacgttgttaaaaacttacgccttctttctgttgctggtgcttactggaaaggtatgtcttcaaatccaatgcttcaacggatttacggaactgtcttctacaagaaggacgcattagaagaagacttaaagaaacgtcaagaagctaaggaacgtgaccaccgtgttatcggtaaccaactcgacctcttctttgttgatcctaaggttggtgccggtttaccatactggttaccaaaaggtgctactattcgccggacaatcgaacgttacatcattgaccgggaagttgccgatggttaccaacacgtttatactccagtcctaatgaatcttgatgcctacaagacttctggtcactgggaacactaccgcgacgatatgttcccaccaatggacatgggtgatggcgaaatgcttgaattacggccaatgaactgcccaagccatattcaagtttacaagcaccatattcgttcataccgtgatctcccattacgaattgctgaacttggtatgatgcaccgttatgaaaaatcaggtgctctttctggtcttcaacgtgttcgtgaaatgactttgaacgatggccacactttcgttacccttgaccaaattcgttctgaattcgcaaagattttgaagttgatcatgagcgtttacgaagactttgatattactgactacagcttccgtctttctcttcgtgaccctaagaacgttaagaagtactatgctaatgacgaaatgtgggaaaaatcccaatcaatgttgaaatcagcaatggacgatcttaaccttgattattatgaagctgaaggtgaagctgccttctatggtccaaaacttgatattcaaactaagactgctcttgggaatgacgaaacaatgtcaactattcaacttgactttatgcttccagaacgattcggactttcctacgttggtcaagacggtaaagaacatcaaccagttatgattcaccgtggtgttgttggaacaatggaacggttcatggcttacttaacagaaatttacaagggtgcattcccaacttggttagccccagaacaagtccacattatccctgttaacgaagaagcccatggtgaatacgcagataacctcgctaagaagatgaaggctgctaacattcgggttaatgttgaccaccgaaatgaaaagatgggctacaagattcgtgaagctcaaacacaaaaggttccatacactcttgttgttggagacgatgaaaagaataacaatggtgtatctgttcgtaagtacggtgaaaaggaacaaaatgaaatgagtcaagaagcatttatgaatgaaattcttgaagatattgcttcttactcccgtgaaaagtaattaagactaaaaatggctctatcacaactttgtgaaagccatttttttgttttaaattttttgaaagtgaaatttttagcataactttaatcaccaaaaataaaccgttttcgaagtgttcgtgaagttttggacaacctaaaattagtaattgacactattactcaaaggctttatagtaataaacgctcgcttctgagccactaaatatattaattaattattctaaaaacaaaaactatttattttggaggtataagatatgtctactatgaacgatttatttaaagcaatgggtaaagctactgaagaacatcatgctagcggtctttcatttgaagctaaaactgatgcacctgctggtattggtcaaggtatccttaacgttcgcaagtaattttaaaaggtcatgattaggaatttcccgatcatgaccttttttatttatccttaatagccaaagcaaatataaacataactaaccccagagcaaatagaacacttaatgaagctgcaccgaccgtcgatttaccagtccattgagtaacgacttcaacaataaaggggccaagcttcccaaggatattatagaaaccaaaaaattcgctactggcatttttaggaacaaggcggccgaagtatgatctactaagtgcttgaagtccaccttggcttgtcccaactaaaatagctaaaatccaaaaatcagtcaaagtttctaaccataaagcataaagacaaataaagaaataaacgataatgcccagcataataattcgtctcgtagaaaatctattagcaagccaaccatataaaattgaaaatggaacagcaattaactgaactactaacagaacgaccatcagcatcgtggtttgaattcctaagtctttaccaataaccgttaccattgtaaagattgtatcgacaccgtcaatatagaagaagtaagcaactaaaaaccatgtcaactgcttatattgattaatatgatgcatagttcttctcagacgacgcaaactatcgacaaaaggatttgcaacactgctgacgctataacgttgatgaccattttttaataacggccacgcaaaaataatccaccaaactgtagccaaaactaaatcgggctactccataactgcttaagagaccgctaaagcccttacttagttctgctactaaaaagataataaagacgactactcctcctaaatatcccattccatagccagtcgatgaaacacgatccatttgcctattatcggccacatctgttaaaaaactgtcataaaatagatttcctcctgagtaaccaataattgacccaatataaacgattaaaagtagttgccagtatttagttggaacaagggcaagcccgattgtcagtataattcccaaccaggtaaaaagatttagccagcgcttctttgcatacgggtaatcagctaatgcccctaataaaggcgctaataatgaaataacaagcgtaccaaaactattagcatacccccacagtgctgtcgagtttgctgcactaacaccggcatgatcagttactgctttgaaatagactggtaaaacagcggtcacaactaaaattccataaccagaatttgcccaatcataaaaaatccgttgccattgttgtctcgtaaacttcacaacgtcacctcagtctttaaagattgcatcaattgcttgtccggcagttgaagtcggataatgtaatcctaataatttagcaaatgtcggtccttcgtcaaccaagcgagcatgttcaacagtcgcaccacttttgatttggagaccagcaaaaatagcggtagtgaagtaatttgcttgtgttggcccgtaaccatgaacgccatgatagcgatcgtgagttccaattgattctggatcaactttttcgacaatcgctggtctgtttacctcatcggtgaaatattatcctggtttggcttcgacgaggaatgtgcacttaggatctgccccccgtttgatcgccgctgcgttatcatagattcgctcaaccccttcaacaccagcaatcatttgcttaatttttcctcgatccacggcaccacgagtgtaaatataagtttctccatcgcaagttttagcagtgacttgccagttatttcgataagtgcttttctttccaagagggtgaagaagtccttgttgcgcaaataacatatttaaatgaatcatcttatcaacattaatttgatagtgatctcctaaaatcacaaagtctgtttgcgcgtaagtaccggtatcttttgccgcttgaattatcttagctacacgtttatctagacggtgtaatgcttatttggcttgtggtgatcgaactccataacggtgacgcatactatccatatcaactaagtgaatcaatgttaagtccggctttttattttttattgtatcaaccgcataggctgttacaaaatcgtcaagccacggctgcttaatcccgtgacgtaatttaccgtattttttattcatttcatatagaaataacggactacttgcctttaacgaaaccagtacttgatttgtccaaattcgattaggaaagatttctgcaaggttataatcaatcttactgctagcagtcacaggccacaaaaatgcagcagttgttaagcccttttcttttgcaacatcatagaggggcatcaattgaatatcttttcgataccagaaccagtcaggcgattgccggcgcggctgcaatttagtattgttaataattccatgtacgaccggatactgaccagtaataatcgaagtatggtatgggatggataagttaacgttggaaagattccctcaacttttttcacccatgttcctttttctattaaatctgctaatgttggtgttaattgacgtaattcgtttaggtcacgaaaacctaatgaatctagcgaaataacaatcagcttatgctgtttcatcagttcatctgctttcttttcaaactcattagctattttaaaataaatcattgttaataactagttttgaaagaaattatcaaaaatcattctcatcgtaagcattaaaatttgtatgataaaaaagttaacccacattagtaagccagcgattttcaataagttttaaagtgaaatttgattcacagtaatttttaatgtaaaattaagtttcagttttcagtattttatgaaaggaatcataatcatgcaaaatcagttacccaagggaaaagagcatgagaaaactctcggcctctttgacctttctattctaggtattggcgcaatcatcggaactggaattttagttttaactggaattgtcgccgcggaagattcaggtccagcaattgttttctcttttctgattgctgctcttgctagtggtttaattggtctctgttattcagaattaaccactagtttacccaattcaggaagtgccttttattacgcgtgggtttcaattggtaaatttatggcgttccttgctggatggacgctgattggggtctacgttactacaaccgctacggtagccaatggttggactgggtacgtacaatcgttcctagaagtcctcggagttaatttaccacataaattactggttacgcctgcagctggtggttatgtaaacctccctgctgtcttgatgatcctttctatgacgattattttgacacgtggaactagtgaaagtaaacttgttaacaacttcttggttggtgtcaaaatctttattattgttctatttatcgttgttagtgctcaacatatcaatctcgctaactggcacccatttttaccatatggatacaagggaattttcacaggagcatctgctgtcttcttctctttcttaggatttgatgcattagctacttctgctgaagatgctaaagatgttgataaaaatattccccgggcaataattttatgtttagttatttcaactgctctttatattttagttagtcttgttatgacgggagttctaagttataaagatttgaatgtctctgaagctatgtcgtatgttcttttagctaagggtcataaatacgtggctgaaattgtttcacttggcgctgttttaggaattatggctgtcgtctttgcattcatctatgctggctcaaatatcatgaagtcaatgagccgaagtgcctttcttcctcaaggcctcgctaaagtcaacggcaaaactcaaagtcctaatcgtgctatttggctagtcggacttctttcagctgtcctagctggagaattcgatctccattatcttgcattaattgccaatattggatcattggttgtctttgctttaatttcgctcatcgtaattatcttacggtaccgttatccagaattaaagcgaccatttaaggtaccttttggcaacgttattcctgtgctatcagtattaatctgtattgttttattagtaagcatctcacttaatgcttggttaacatacttattgtggctagtagtcggattaggagtttacttcttctattcccttcgtcatgccaacgaatttaatttccaagatgaaagtgatatcccaggtaattaaaatttagttctaaattatgatagacctctacattgatccagaatgttagaggtctattttaatattatttagcacttcgattctgacgagttgtttccgctaagtggactaaattagtaacaaaattatgagttttggcttcataattatattggcgacccagcttaacaaagtaaccattgatataatcaacttccactggacgattatgactcatatcttggtacattgaaggataatgatgcggacagccaactttagagacataatttacactttctagctcttctgctcgcgtattaactaattgtacccctgcacgttcacagacatcatatgcttcatcgattaattgccgagatagttcatcagccttatcaaacgccgcatattcacccattgtaatttcaaacatagtacaaagggtattaacgactgaattaaagaccacttttgccatcaacgttcccataaaatcatctttaagggatggattaaagtttgcttttttaagttctgccattaacgcttgtgtcttctcatcaggcttttcagtataattagcccaattagtcgttcccatccctcgttctccaacaaattccacttcgccaggtttggttaaaatagttgctactaaggcagttccagcaactactttttcttttgggaaatacttcaataatttttcaacatgtcccattccattcatcgctgtcatcgcatattgatccttcaagaaatgttcacaacgttttaacatatcatctaactgcatttgttttaattcaaagaaaacaaaatcagcatctgtagcattgtattcttcaggtgtataaacattaacgggaacaaggtgtctatttttatgctcgcgagttacataaacgcctccttgttctttcatcttattgtaatgtggtaaccatccttcaacaaaatcaacttcattacctgcttcttgtaataaaacaccaaaccgtaatcccattgcacctgcaccaacgactgtaaatttcataattatctctcctttttatgactataaaaaagcgtccttagattaaacaacttaacctaaggacgctttttgcgtggtaccaccttaatttgccaacaattcacattattagcctcaaatgttcaatgcttccattaaacacgtcagctataatgggctgatcccaccattaattactaatttcatcatggcactcaaagtgattttcattataagcaggttatcctttttcatcaaccaaggactctctgctaatccactcataattactcttcttttcaacgtgttttcataatcacattttaatttttatctaatttaatactttgggttgtaaatgtcaagatttatttttgttataaattatcttgacatccctatttcatccgcgtattataatgacaactaaatgagagaaagcttagaaaagatgagtaatcttagaatcttattacagagaatcacggttgatgagaggtgacataagagactgagacgaagatggtcttggagcttcacgaattacgagtattttatataagtagttcacgattgacgaccgataaaacgtctgggtatagcttccattagtgtacctattgaggatagtattgtgagatactatcaaattagggtggtaacacgttaattaactattgattaatcaacgtccctaggaaaagtagaaatatttttcctaggggcttttttattgcttcaattcttgaacccatcacgaatagaaaggatcgatttactatgactgaattcactacacgtactacatcaccatttcgttatgacatcgttggaagcttccttcgtcctcaagagctaaaagaagctcgtgcaaaatttgcaaacggcgaaataacacaagcagacttaacagttgttgaagataaagcaattattaatttgattaaacaagaagaagctgccggcctgaaagcagttactgacggtgaattccggcgtagttggtggcaccttgactttttctggggattaaatggcgttaaaaaagctactctaaaggaaggctataaatttgcagatgaagagactcgtcctgaaactgcgcaaatcactggaaaaatctccggcgaaaaccacccctttgtcgaacacttcaaatttacccaagctcatacctctgatggcgttcaagttaaacaaactatccctgcgccagcacaatttttagaagaatttcttcgtcccgaaaatcaagctaatgctaaagaattttatcccaaccaagaagatttagatcatgacgttgccactgcttatcatcaagtgattgaagatctttatgctgctggttgtcgtactcttcaactagatgactgtacatggggaatttctgttaacgcctttgctaacctaaggaaaaaagaccccaatgctgatgtatctcagcttaaagccctgcaaaagcgatttttaaaagtaaacaatgaggcaattgctaatttacccgccgatttaacaattaatacccacgtttgtcgcggaaactatcactcaacatgggctgctgccggtggttatggaccagttgccgacacactatttgctaaagaaaacgtcaatgccttctatctcgaatacgatagtgaacgtgctggcggatttgaaccacttagcaaagtttctgatgataaatatgttgtccttggtttaattacttcaaaatcaggtgaacttgaagataaggcagcaattatcaaacgaatccatgaagctgcgcaattccatccattagataagctctgtcttagtcctcaatgcggcttcgcatcaactgaagaaggaaacattttaacagaagaacaacaatggaaaaaggttgcacttgttaaagaaattgctacagaagtttgggaataatttaaaatgaataatgggagcgaggcagaagtcacttgtgacttcgtttttcgacgcgaagctagcctctgggagcccccgcaagcaacaataggcctctagcgttcggttttgccggacgttagaggccattgttgtactgcgtatttgctttttatgaaagtaacttaacttatgtcacagtcccatttattcttctcccactaaattgccaatacacggtctttatgcggagagtaattaaacagaacatctgtcaaatccaatcctgccttatttccatgatgggtgccatcttgccatgcaggaatatgagttacatcatagacacgattattaattgctacataagctggattcccgttttgcccatcatatttttcaattcttctcttgtaaatgtttttgccataatattccgcctccttatttgatagtgtcaattcaatatcctcactatatcatggaagcgcacacaaaaaaattaataattacctcactttaacgcaaaattatactctattagtattttcttcacaattaatctaatatcatatctaagtgcggaatattgtcttcaaggtaaacatctgaaatcggcttaaatccaaacgatgcgtaaaactctttaagatatgcttgagcttgaatttgaattgtcttatttgggaaaagacgcttagtttcatcgaccgttgcctgaactagctgacgtccgtattcatgtccacgaaattgttttaaaactaatacgcggccaaaagtcgcatgagagctgtccttagccataattcgcgtataacctactaagtctccctggtcatccttcagcattaaatggtgagcttgataatcctgttcatcaatttcttgataaggacattcttgctcaacaacaaatacttttatccgttcttctgctaatctacaccattcttgagcggtcatttcacttagcgtttttacttcaacattcatattaaaacctcctaaaaaataaaagagtactaaccaacttcttcatgtcattgtgacaggccctagtagaagatggctagtactcttaatgtctttaatccggggactaaagacgagtcgttagtaaattattcggtatcagtatacaatggattaatctatcttgcaattagcgatttaataccaagcaggtttatctccgtctgtatttggtttattcacaccaaagttttttcgtgcatatggtgccggatcatcaataatttttgctacaaaattaccaattgactttcgcgagacctcggtacctttaaatggttctccttttgcagtcgtttcgtaatccacttcatccttatctgttaaccatgctggtcgaatgattgtgtaatcaagggttgaattttcaattacatcggcagcactgcgataagttcctaaataactatctttctggccgccacctaacatttcattattccactcaccaaatttacctggaacttcatcatagattccaatcgaggaaatccagactaacggctttacagcatatttttccattaagctgacaatatttttagcttgttgcgtaatttcaggatttcgtagattagcataaactacatctgctcgttcaatcgctggctctaaatcgccaatatttaggacatcccctttaataactgtttcacgattttcatcgacaacattcatattttgtgggtgccgagtaaatagtaataattcatcattgccatttgctaacaatgcatcaattgcgtgtccagcaatttttcccgttgcacctagaatcaaaacttctcttgccattatttctacctcctcataaattctacttttagtatacaattctctataccaattaaaagtaagcacacacaagtaaggtagttacactcaggtaagatatgattgatggacaagtaatcggcaaaattttattttttagtatattttttgccccactggttaattgacctaattattggtaccaaactttttcctacttccgtcaatgaatactcagtcttaggcggcactgtcgaataaacacgcttttgtataatatttgctccctctaagtcctttagttgaagagccaacattctctttgaacaatctggaattaatttttgcaactccgaaaaacgacaaggctcatattcactaatttgatatataattacgcttttccactttccgtttattaacttaagcgtattctcaatcggacaatctttttcgaccattttttctcctttctctagtgaaataaaattcacttcttgtatatttttatttttaagttactattagtaagtaaagaaatgtacgggagtgattattatgaattcacaatttaacagtttagctgcaaatcgtcgttcaatctatgcgcttggtgataatctttcacaaacaccagaagaaatttttgacttagtgaagcaaacaatcaaaaactcaccaactgcttttaatagtcaaacagtacgggcagtcgtattatttggcaagtcatcagataaagtatgggaaatcgttgaggatgctttacgcaaaatcgctaagagtccagatgcttttgaacaaacaaagtcaaaaattgatagtttcaaggcaggctatggaacgatcctctactttactgacactacaattgtgcatcaattagagaatgattatccatcatatgcagctaattttgcaaactgggctgaacaaggcctcggtggtgctcaacaagcagtttggacagcactcgcagaacaaggaatcggtgccagtcttcaacattataacccattgattgatgatgcaattcatcaagtatttaatcttccagctgattggcaattgcgtgctgaaatgccatttggttcaattgaggcaccagctggagaaaaggctcagcttgatgacgaagagatgttcaaattaatcaagtaaacttattattctccatcctcttgaacggtatataattattgtaaacacgttaaaggaggaattttaatggaacggcaacctaaaatgtataatactggagcagattatgctttagcaatcattggtggtaaatggaagtccgttatcctttatctcttagctggtcatccccgacgaacaagtgaactagttaagcagctaggcacctcatataaagtcttgagtgaccagcttagtgaaatgatagatgccggcctcgttatccgaaaaagtttcaatacgattcctccacatgttgaatatcgcttaactcctgagggtgaaaatctttatgctgcccttcgttatttaaattactggggtgaaaatagagcaaaacaaactggtgacattaaaatcatgtgtactgacgaaatgaagcaggtcggcgatgatggtctatgtgtcatcactaaaaaacatcttaatcattggcgccaagaaattgtaaaaagcaaggacaaagatatttctatctaagttcttgcttttttgtgttctttaatctaaaagccaacgccattataaatataatcatgtagctcgcaagaataagatgggtattcatgataattggaaagctttgaatacttgtttttcccaccgaaaacgcaccaaaaattctattaattcctgttgttccagcaaaaataaataaacttccccacattactaattgggaaattatccccgcaattgatgcatagtaataattgacgatcgaagaaatactataattatgggttgctttctcgtagtcatcaattgctgttttacgttctgcaccggcaaagctacggatgataaatacgccaataaaatatgttggcaaccaaaatgttaagagaattccaattgttagcatcactaaattaatttgacaatccttaaaatggaataaatggtgggtttgttttaccaataatcctccaaagacgaaagcaaataagtaagcaacaattgtccaagaatacatttttgtgccatacaaaatgccaataaaaacggtactatacagggtccaatactgaccacaagcaccataaagcattattcgttgccgtaaatgattgggatagtgaagtaatcgccgatggtttacaagcaaggtaaggatcatcgtgatgaggaagattaataaaagagcggttccccattcaagtggtttcccaaagcctaaacttctccctaatcgcaacagtaacattgcgccaagcaaaattaatgctagtaagtaattagcccaatgtagacgaactggcagcggacgaattgcatggggtgttttccaaattgatcccattgcaccaaaagtaatgattaacattaaaacaaaactaattactggcttctttatccacacaattatcccaaacacaatcaaaactataataacttgaaaaagcggcttaagatgatcctgctggggtaagagtcctcgttttattaatcgccgccgctgacttattgcggttggaaatagtcgagaggcaatccctgcccctgcacctgacaaatcccagaagattggttgaaatccaccaaacatccctaaaaagtaaccaataattccgctataaagaccaatccaggccagccgttgataatcgtattctaaatcacggcaaaataataaaattgtatgccggaaagcatagaaaatagcgaagggcaaggcaccaacaaagatatcagactgttctttagtaagggaaatatacagcaaaaaaggcattaaatttaataataaactacagacaccagtcaacttttctaattttttcatttttatttcctctaatgctggtcaattgcactattcagtttctttcgatttactagaaaaataataataactaacgggacaataaatagcattacgggataaaaatatttcacaggtaacgtactatcaacaatccccccgatgattggcccaagcgtcattccaatatcaaggccgagaaagaatgtcgaacttgctaaccctcgttcattatctggagctagcatcattgcagttgattgacaaacggaataaataataccatagccaaatgccattccagcagctgccagtgccatttcaatgttatttttcataatacttaacataataagataaaagattgttgcaaccgtgcttaaaatcaaccatggttcaaaacggacagtatcaaattgggtccgtaagaataatcggctaagtaaaagaactacagcataaattaagaaataagcaccaacagcaatagataagtgacgttgttcagcgtactcaacaatatctgcctgcgttgcaaaatatgggatagcaaataaagctgttaaaagggcaaccgggatagcgtctcgctgaatgattttaatatgaaagccactttgttttacagagtgtgctgccggttgagcgcggttactgacaaactgaattgtgacaacaaccagtaaagccgataatgctgaaatcaccattgcagctcgataaccaataattcgatataagttaattgatacagcgggggcacatgccattgccaaagcgttcatcagtccataaaagctcattgcttcgccaacatgattaaatggaactaaatatgatagccaggttgtcatacaaactgtacataatacaaatcctaatccattaaccaaacggcatattaacaagaaagtgctattaggcgttaacacataacctgcaaccccaataaagcacaatattccaccccaaaaagctaatgaatattttgaaaaacgatcagtcagattaccagcaattggtcgcaaaaacattgaaacaatactcatcattccaacgattatacctgcaaaagcacttgatgcgcctaaatcttgagcataaccgttaatcaatgggttacagtacatattactaaacataaaaaagaacgaagccgccattacgagcacaacatcttttgtaaaaatcgatttttccttcgccatcaattcccctactttctttgcatgattttaattaaattctaattactatcatacaactatttggggaagttaaatgatttcccaggaaataaataaagagattgggttttgtttcccaacctctccgtgtgtacttcactatttatattttactgcaaagaatcccaagctggtagagtaacgggttcactggcagctactttctttactcgatcgctaaggtacttcttattaataacagcctcataagtatactcttcaaaccaatcttgggtcattacaaagtatccgttatcgccattatctttaccccaactgttttcaatcttccatcgtgtaggttgaccatttaccatgtcaaagcctgttaatgtcattgcatgagaaacgacggcttgcttagtttccaaacggtgcttcttatccattacaaaatcaacatcaagcaattcctctcgatgatataattttgcatccatcaagcctcgcttacggtccatttgttggagaacatcattcccaacccaaactgtttcaccagcttgcaactgtttgatggctccttcttgtaattctgcaaaaggaacattaacaaatttaattggcaaaccatcaaccacactatcttgcgctggcattaaataactccgatccatttcatgatcaggagcgttagtaactacaacatagtcacttaagtttgtatcaaagtattcatgatagaactttaatggcgttaagccaagaacttggtggaactttttatcatcatcccgatattcaagatcaaattttgcaggcggttcaccaaatgagtaggctgcaatcttataaacgtcacccatcattcgttcttgtgcttcctgtaattccgttgcactggcattagtttgcaccattacccgtaattcaattgcatctttgcgcattaagctatcaaatacttcggctacatctgaagtatccttcgtattatgtgtgtcaggcattacatattctggaacaacaccatatttctcaataatagaagcggcattagcccattgtccaccatcatttaatgcaaaactaaggtagaaatcaacggttcgatcatgcaaaggcttatcagcagttgcaataatcttctggaaaaacatatttgcccgttcaattcgatcccagaaaaatagataattttgtgacaattcaaagtccttgaacttatattttgttgcaaacttatgacgtaatgtatttaatgctgcaaaagaccagcaacgtccactatgacgctggttggttggcttccccgtcttaatttcataagaaaatgctcgatgaagacgttcgcttgccgttggatcttcactcgcagctttaatcccatttttttgtattgcccgggcaataatttctgcatctttacgtgaatgaaattctttctttaatttttcaaccatttttgaggttaaatcgtgttcttcagtcacaataaatcccttctttgcctaaaattctaaaatgacttatacattattaatgataccgcattttcttcaaaattattgacttaaaagcttttctattttaaacaagcatcaatcctttactgcttataaaaagtaagctaagattgtatttagtaagtcacttttaattataaattatatgaactgcggtaaaattctatctaggaggtcgattaattatgaagaaagtatttgttgtcggtggttcaggccgtgttgctactgacttaattaaagatttagttgccactggtaatgaagttacagctggtgctcgccatccggaaaaagttattaagttaaaccacgttactgctgttgaattgaacctacatgatagtgttgaaaaaatcgctgaattaatgaaaggcatgaatgcaatttactttgttgccggatcacgtggcaaagatttactgcaaactgatgcgatgggagcagttaaaacaatgcaagctgctgaaaaagacggtattaaacgttacattatgttaagttcgctatatgctttacaacctgaaatgtggtcaaaagttccatcattagcttcaattatggattataacattgccaagttctttgctgataattatcttatctcaaatacaaatcttgactacactatccttcaacctgctaatttaactgaagaacccggtaccggtaaaatccaaattggtgaaggctctgcaacttctaatccgattccagacgttgcccagactttagccgatattctacaacacgataatacaatcggccacgtcatcatgatgcggagtggagatacgccgattgaagaagcactagatcaaatttaattttttacaggttgttgaccagtcgaaatagcgtaagattggcctacaacttttttctattctaaaatcaggtaatagtttagctaatttttctcatcagccgtataataaacattaaaaacaaattaagaagggaatcttttacatggcaaaactcgaacgcttttataatactttccaacctgaccattatgatgtttttatcgatattaatcgagcaaagaaaactattaatggaaaaacaactatcactggtaacgcgactgatcctcaaattgcaattaatcaaaaaaatttgcaggtcactggtgttcaagcagacggtcaagaattagactttaatattgataatgatgccgaggcagttcggattacccttccgcaaactggtaaagtaacttttactgtaacttataatactaagttaactgattcgatgatgggaatttatccatcatactatgaggttgacggggagaaaaagcaaattatcgggactcaatttgaaacaacttttgctcggcaagcttttccctgtgtcgatgaaccagaggctaaggctaccttcagtctagcaattaaatttgatgagcatcctggtgaaaccattatcgctaatatgccagaagatcacgttgaaaatggcatccactactttgaacccactgtgcgaatgtccacttatcttgttgcctttgcatttggagagctccaaagtaaaattactgaaacaaaaggtggcgttaaagtaggtgtattcgcaacgaaagcgcaccaaccaaaagaacttgattttgcattagatattgctaagcgggcaatcgaattttatgaggatttctatcaaactccgtaccctcttccccattcatggcagttagctttacctgatttctctgccggtgcaatggaaaattggggattggtaacctaccgagaagcttacttattactcgatccagacaacacttcccttgaaatgaaacaattagttgcaactgtcatcacacacgaactagctcaccagtggtttggtgatcttgtgacaatgaagtggtgggatgacttatggcttaatgaaagttttgctaatatgatggaatatgttgccgtcgatgctctccagcctgactggcatatttgggaacttttccaaacttcagaagctccaatggcattacaacgagatgcaactgatggtgttcaatccgttcatgttgatgttaacaatccggccgaaattgatgccttattcgatggtgcgattgtttatgccaaaggatcgcgaatgttagtaatggtccgggctcttttaggtgacaaagcgttacgagaaggtcttaagaattattttgctgctcacaaatacagtaatgcaaccggagctgacttatggaaagctcttggcaacgcatcggggcttaacattggaaaaatcatgaattcatggcttgaacaaccaggctatcctgttgtaacagcaaagattaatgatgatggcgatttagtactgtcacaaaagcaatttttcattggtgatggtaaagatgttgatcgtcaatggcaaatcccacttaatagcaactatgatgaagctccacaaattatggcggaacaagaactcaaccttggaaattatcaagcattgcgcgataagaatggtcaaccattccgtctaaacctcggcaataattcacatttcatcgtaaaatatgatgatacgctactaaacgatattttagatcatgctgatgaattagacccgattacccaacgtcaacttcttcaggatctgcggttacttgcccaaggacaacaaatatcttatgcgtcattaattccattattaaagcaatttaaagatagtccttcagcaattgttaacgccgaactataccaaatagctaatggccttaaaatgtttgctaaacctgattctcctgctgaacaagaactacgacaattctctgatctattaagtaaggatcaagtaaagcggcttggttggttacctaaagatgatgaaagcaatgatgaccaattgacgcgcccttatattcttagcacttcactatttgcacgcaataatgattcaattactcaagctcatcaaatctttactgaaaatcaggataaattagagtctctttcggcggatattcgtggtttagttcttaaaaatgaagttcaaaacttcgggagtgctgaattatttgataaattaatcaaagcttaccaacaaacagcggacgcaagctttaaacaagacttgcgaatggcaataccaaatacaactgatccagcattaattgcaaaagttgttagttactttgaagatgctgacgtcattaagccacaagatttacgagcatggtatcgtggccttcttgccaataaagcaggtcaacaagctgcctggaattggcttcgtgatgaatggcaatggttaaatgacacagttggtggcgatatggaatttgctacctttatcactgtcactgccggcgttttccatactcctgaacgattgaacgaatttaaagacttctttgaacctaaacttaatacaccaggtttaacccgggaaattaaaatggacattagtgtaattgaaagcaaagtcaatttaattaacaaagagcaaacagctgttaatgatgcaattgcgcaacaataattaactgtaaagccctataaaaaacgcaactaaggatttttcctcagttgcgtttttattttaaatctgctgctttaataaatctaaccttgtactttggcgttgtaaaatatcgtcgattacatctgctaatgaaatttgcttcatctcattaaaagctgctgcttgaatctgatcataatacttttctaatgacgcctgaatatttccaccaacaatacacttcaaattagtttttggatcaacatgaagtaaatcatgatccatatttattgcctggtagatatcaaacaggttaatctctcgtggctttttagctaatcgcggttcagcagccccctttctagttacgatcaaaccagcagtcctcaaatctgacattaattgacgaacaacactcggattcgactcaatactatcagcaatcgctttactagataagtcaccatcctgataaacgtgcaaatagcttaataagtgaacagcatcacttagtttatatgaatatttcatactcctattttatcttgttgttttataacattcaagcgctatagtattaatttatagttttcacttttaataactacgcttgttaaataattttaattctagcaaaataaagacatgataaaaataaaatcacatgtttgagcttgattaataaatatatttagcatatattactactgttggggtaggaatctcagagttattgtctaacggaacggaatgtgaacgttagaaggaggcttataactaactgctttgttattccgcattcaccatgaacggaaacgtcaatgtgttccctaacaaaattttcaaaagggagtggattgatatgtctacgttatcatttgccggaccgcgttttactacaaagaatttgactttagctgctatgctggtcgcactgcaggtaatcttaaataaactttcaattggagatccagcggttttaaaatttagttttggttttattgccactgcacttattggttactgtcttggaccatggattagtggatgatcaatggtcgtatctgatatcataagtaatactattttaaattcaggaagcttattctttcctggctttaccttatgagcttaagttccagtagtaccggccatactttcatggctctcctcttcattcgtttgccaaaagagttgattatctggccgattgaaaccttgcttgtactagttatcctgcggcaattatcacgattaaatttaattgcaaagaagagcgaaaaataaatttatttggtggattatagaatgaagttagccacccagttggtggtaaataaaaaacgccattcggcgtgacatcaggtatcatattaagtgaaccaaacctatatgaaaggatgtccgtcaaatgacgcacttaaatgataccatgtctactagtttattgactactcataaaaagaatgctcatcttactaaagaagaacgtgtgatgattgcgactttaaagtcgcaaggactttccaatcgcgcaattggtcgccaattaggagttaatcatcaaacaattaataacgagctcaaccgtggtacggtccgccaacttcgtcgtcaaaaatctaatggtaagatttacgaatattcttactacatctatagttatgaagctggtcaggccacatatcttgaacatcaccgccattctggtcgtcgtcgcttatattattcttcaaagcaatttttacgattagctgatcagctaatgcttggtgagtttgacgaccaccattactccccacaagcggttatttataaggctcgagatttaatgaatgatggcaccctgatcccaaagtcggttgtaactttatatcaatggattaatgagggtgtgcttcgtacgtccaatttagacctctttgaaaagcctaaacgtaagcatcatcgaactcatccgcaagctaaaaggtgcttaggtcctaatattgctcaacgacctcaaactgcggaccaacggtccgaaattggccattgggaactagatacagttcagggacagaaaaacggtaatgacagtgttgtactagtaatgactgatcgcctttcacgagttaatatcacgagtaaaattgctggtaaaactgcgcatgcagtaaatcagttctttataaatttacgccagaaaatgggcacagatgcttactatcgcatctttaagacaataacctctgacaacggttcagaatttagtgagttaacacaagttcacgatcatgttttctatgctgatccgtattccccttgggaacgtggatccaatgagatcaataaccggtttctccgcaaggagattaccaaaggtgaagctataaataactatagtagtgctcagatcatagcgactaatgattggatgaatcactatccacgagctatgtttaatggacattcgtcaatggatatctatcgtaaggccttctaccaagagatatcacagctccatcaaccaataatcaattggtcagtattatttatttgagtccagtggctaacttattcttgaaatttaggaaataaatttatttaaaaaagtattgcattttaaatgaattaggttaaaatacaattaacaaaataaaaaagcgatgagaaagaagagtaactagttgtattcgttcagtgaattggtggtagtgagaaaccagtcgaccctacactagtgaataacactttcgcgagtgctgccaacccaaataagtttacttaaagtaggcttggccggatccggaccgttacctcaccggcagagcatgatgtgctcttgaggaggcctagttttatactagacaatttgggtggcaccgcggaaaaaagcctttcgtcccttgattataaggggaacgaagggcttttttaattcattcctaaatctattattttaaggagtgtctattatggacttaactattccaaaggattacgatccacgtctttcaattagagaaactgaaactgctattcgttatattcgtgaaactttccaagacgaatttggtaaagagttaaaccttcaacggatgtccgcaccaatgtttgttgaaaagagtactggattaaacgataacttaaacggtgttgaacaaccagtatcgtttgaaatgaaggatatgccaagcgaaactgttgaagttgtccattctctcgctaagtggaaacgtcttgctcttaagcggtacggttttggtatgcatgaaggtctctacaccaacatgaacgccattcgtaaggaagaagacctcgataacttccactcaatttatgttgaccagtgggactgggaaaagattattagcaaggatgaacgaacagaagaaaccttaaaggatacagttcgtgatattttcaaagtgattaagcatatggaacacgaagtttggtacaagttccctcaagctgtttaccatttaccagatgagattcactttgttacaacgcaagagcttgaagatcggtggccagacctcaccccacttgaacgggaagacaaaattgctaaagaacttggtgctgtttttgtaatgaagatcggtgacaagttgcaacgcagtggtaagcctcacgatggtcgagcacctgactacgatgactggagcttaaacggtgatattattttctggtatgaacctcttcaacgccggatcgaaatttcaagtatgggaattcgggttagtccagaatcaatgaaataccaacttgaacaagccgatgcaactgatcgtgaaaaattaccattccataaaatgttgctcaatggcgaattaccatatacaattggtggaggaattggtcaatctcgcctttgtatgctccttcttggcaaagctcatattggagaagtacaggcaagtatttggccagaagatatgattaagaagtgtgaagagaaccacattcaaattctataatttaagggagagtataaaagtggaaactattacaattagtgaagcaccaaagcatgttggggaaacagttaaaattggtgtttggttaactgataagcgttcaagcggtaagattgcattcttgcaactccgtgacggaactggatttttccaaggaatcatccgtaaaaatgatgtttctgaagaaaaatttgattctgccaagcatgatttacaccaagaaaccagtttttgggtaaccggtgaaatcgctgaagacaagcgttcaaagtttggttatgaaattcacatcaaagactttgacattgttggcgaaagtgaagattacccgatcggtaacaaggaacacggaattgatttcttgcttgataaccgtcatttatggttacgttctcgcaagccgtgggcattaatgcggattcgaagtcgtgttaagcttgcgacaatggaattcttcgaaaagcatggatttactcaatttgatgctccagaactaactggaagtgctcctgaagggacaacagaattatttgaaactgactactttgatcgttctgctttcctttcacaatctggtcaattatatgcagaagctggcgccatggcattaggccgcgtctacacgatgggtcctactttccgtgctgaaaagtcaaagactcgtcgtcacttaatggaattctggatgatcgaaccagaaatggcttggatgcaccaagatgaaagtcttaagattcaagaacaatacattgcttacttggttcaagacttaattgaccactgtgcacgcgaacttgaaatggtagggcgtagtgtagaaagtttaaagccgttcactgaattaccatatccacggatcacttataaggaagccattgaaatgcttcaaaagggtggctttgatgtagaatacggtgcggactttggttcaccagaagaaacctacttagccgaccaattccaaaagccagtctttatcttgaactaccctaaagaaatcaaggctttctacatgcctgaagatcctgaagattctcgccaagttatctgtgcggacttgcttgctccagaaggctacggtgaaatcattggtggttctgaacgttcctacgactacgaatacatcacaaacaagcttgaagaaaacggcttaagtaaagaagattacggttggtacgacgatttacggaagtacggttcaattccacactctggatttggaatgggacttgaacgattccttgcctggattactctccaagaccacattcgtgaaaacattccattcccacggatgcttaaccgtttgaacccttaataacgaaaaagatgagactagatttttagcctcatctttttttatatgcttttttttgaactcaatttactttttctttactattaaaatgagctgttccttttccccagtaaaatccttgttgtaaaataactggattcccagcaaattttttagctaattgccgatttgaaattccttcaataacaaaggtaagatgatgtttttctgcaaaagctaaccacgcattaacaaagcttatcatcagttcataatcttcatccttaaaaagtaatagcgataatttgattcgactaacaacctttagctgtcttttaatgaatgcatagctattactacccgcacacacatcatcaatcgccaattcaaagcccatttccttgagacgttggatttctctatctaaataatcaagactatgaatcgtttcgcggcgttccgtaatctcaatggccacgtgatcgtgatatgcttcgcgaatctctgctaaaaattgccaaatactttcaaatttcatttgacatggttctaaattaatatatattttgcgattttgttgttcgtttaaagcattttttaatgatttacggcttgccttaatccatgcatcgttaccctcttgtgttgtgagactgtgcaagaaattaattcctggaaattcgccattattatttcgaataagcatttcataagtgtcaatttcagcattcatcgcttgatcaacactaaggattggctgaaatatattgtacatttttatccctaacttttaataattgctatttattttacgttctgaactagtctttcgaggacgttggtgatgctgatcagtaacaatccatccccggccattgttctttacaccatataacattttatcagctcgcttcagggtcgtgtcaagtaattcatcattcaaatgatcagttaaactgcatgaaaagctaattgttaatttcattccctccttggtaacaatcaatttattattaaagaatttttcaattgactgtagtaattgataaacctcttctagtgaatggttagaaactacaatagtgaattcttcacccccgaagcgatatacataaccatgcttggaaaatgcggaatgaatttgttcgcgaaaaactgttgaaaaataatttaacacttcattaccagcaaagtgaccgtatgtatcatttatcttcttaaagtgatcaatatctaatgccccgattacgatattatggatttcactattattatctaatcgattaatttcttgactaagcgctcggtagttaagtaaccctgtcaaatagtcacgttcactttctttttcaagaagttttattttttgctcatttttcttctcactataaaaacgttgctcttcaaacatcgcaataacgaataatcctaacgtggctgcggcaacacttacaggtgaaaagctatggttaatccccagcgatactaactcaactattcctagcgatgcaatggcataaaaataactaattcttttagaaatgctgcgccaccgcgttaaaaccaaacaaattgtcgtaaaaacaatcgattcaatgatccaataccaccagtcctttagcggtaaaatccccattaagtattccacgacattcacaaataacggggttagagctaataatacccaccatattttatatactttatcgcgaaaaagcattgtgacagaaacaacttgcatgaaaacaacttgcccgatattaaataaggacaactgaaacaaacaaaattcctgaataaagtaagtaattataataacggctcctagcccccaactagttaaccgtgaattcttatacgaaacccaataccgttcaaaataaatttgactgataatcatacaaataacgatgattggtaaatagagtatcgcgtaaaaaagtttaagcgccaacttattttcaccttttcaaattttatttttattaatagctttaaaattatacttcttatagtcgaattaatctagtagcgcttccaatcttcatttaataaacgtttcctgaaagaaccgtatgatataattatttctgctaacgcgttaaaaatattaagaaaggatgacagatcttatctttataatgaaaaataattaccatgatatgtattttgagcaccaccactggctcttaaaaattcgacaaacactaattatgttccttagctggtgcattttacttatccccattattatcactacttcaacctatgtggcttaccggacaaatggtcatcgcgggtattttttctgggattatgctgaaggatttcgtgaacttaattttttagtaatcattttgctatttgctttaggaatgattggggtattctgcattacaatgggatatatccaagctcaaaggactcgtggactaactacaaaatggcccatgttcgacattaacaaaagtcatttacaacgccaacgagctgaatcattcatgactaagcagtttggtgattttgagatgcgaataaatacgcgcaattttgctgttaagcctgaacaaaatctagccaagaataaactgcgcgatattattaacaagcccataggagatgataaagatggtttctaacattttctatgaagcatttcaaactaactccccatggatgatctctcttataataatcaatttaattttatgtatatatcctattttaggagcgatgttctggttctttggcgcaatatcatatgttctatttcgccaaaaagaagaattaccaccaaaagctgaaattaccaccgaaccttttgtcacgattatgattccagctcataacgaagaaatagtaataaaaagcactttagagtatttattaacccaattgaattaccataattatgaagtgctggtaatggatgacggaagcgatgatcgcacccctgagattcttcgctcaatgcaagcaaaatattctcgtctcagagttattagaatcgaacaaaatcaaggaaaggcccatgcatttaatattgggcttttctttgctaagggtgaatatattttgagcaatgatgctgatactatccctgaaactgatgcactgataaagtatatgcaatattttacaagtactaacgggattaactatgctgctattactgctaatatggacgtttataatcgttcctcattatggggtaaatctcaaacggttgaattttccagtattgttggcataatcaaacgaagtcaaactgccattaataacacgatgtatgcatacagcggtgcaaataccatgtatcgacgcgattttcttattaatgttggtggtttccgccaagatcgggcgactgaggatattagcattgcctgggaccatacctttattaatgctactccgaagtttgctccagatatcgttttccatatgaatgttcctgaaacgtttcacgatttatatcggcaacgtaagcgatgggcccaaggtgggacagaagtttggctttctaattttctgaaggtttttcgccatccgtggcaatatcgatttgtcatccccatgctaacagacacaaccttatcgattatttggtctttctttttttggataacaagtatcattttcattattacaatgttgtattttgcaataattggtaactacgaacggatttggcacggcattgttatgagtatgatctttgtcaactttcaattaatagccggtctttttcaagtactggcggcattgattcttgattttaatggatctaagttacgctatttaatgttttcgccactttatctcttatttacctggatcgttaatcctttaacaatcgttactacatttcataaagcgataaaaactgttaccggccatggaagtggtaaatgggttagtcctgaaagaaaggtagttgataatgatggcaaattttgaaaattttctttggtggatattcattatctttaccctaacttgtggcggcttttgtattgagactcactatcgatataaaaataaagacgggattgataatgagcacaaattttcaaataaatataagtattttggccaacctgtttatgacaaacaaaataaaattcatggttatgaacttttattacgggaatacaatcatcatactaataaatggcaattaccacgaaacgttgtggacttccccctcagtaaaattgtttctacaatccaagaaatcaatccacagttaaaagatatcgcaaacttatcgttaaatatgaccgtcagccaaattaccgattttcgcgctgagtatttctttacttgggtcttaggaacgacaaatattaagcaactagtcattgaattagatgctaatgatattagacgtgccaatatttttaaacgtaaagaaatattatatatactaagaaaaatcaaacgacttcaaattaaagttactattgaaaatgttgattcttctaaaaaaacatacaatttgttacagcagtatttgccagatattgcctatttaaaatttaaaatttaatattcattcttttaataagtcagcaaatcactggatagatgttacactcgcacagtggcaacgaagaagcgccatttttaacattgaaatgattgtcggtaaaattgaagatgctaaccatattgcattagtaaatcaactaaatatccctttccgtcaaggttatgcttacggtcatccagaaaatttaaaaaaatcgagtaggagataattgattagttcaattatcgacctctcacaccaccgtacgtacggttccgtatacggcggttcgacaacttaatcacattgaattgactggagcgtcttggacatattcataagtccgagttgttccagttttctattagttagagaatagctcaaggtcttactgtgtgcagttcgccagtagcccttgcgggtactagcgaagacatatgcatcacgctgggacagccccagcttctgtaagttagttaccttagttttaagcttcttccattgcttccagatatactgtcttattcgggccctcaaccacttgtcaaggcgttgaataaagtcagttagtttcccaattgagtagtactgaagccatccacgcatttttcgatgaatttcttcaaacattcttgtcagggatattccacgattacgtttagttaataacctcaatgctttctttactcgttgttgcgattgttttgctggacgggcgtaggctccattgtggtctacacccaacgaaaagccaagaaactttaaccgtagcgggctaccgactttggttttatctgggttcactttaactttcaatcgcttttcaagaaactgggtaatgcttcgcattactcgttctccggctcgttgacttttaacataaatgttacaatcatccgcatagcgcacaaagtggtgaccacgtctagtcaactctttatccaactcatttagatagatattcgccagtattggtgacaatggccctccttgtggggttcctttttcactcttagcgaaaagcccatggtctaagactccgctagttagaaacttacgaatgagccttagtgtccatgggtcatcaatatattgttgaagatacttaatcatcaagtcatgattaacattatcaaaataggcttttaggtctaagtcgacaactcttcgataaccttgattataaagatctactacttttgcaatagcgtcgtgagccccacggtgagggcggaagccaaaactattatcagagaaaacacgctcaaagataggtgtaagaatttgggccacagcttgttgaaccattcggtccaccactgttggtattccgagttttcttactccaccattaggcttcggaatttctacccgtttgactggtgctggtttatacttgccctcacgcaaactagcgatcaattccgtcttattttctctgagatatggcagaaggtcattgactgtcatatcgtcaatgcctgctgcccctttatttctcttaactcgcaaataagcctgattaaggttattgcggtccaagactaagtcttggatagtgacactcatacctttaccttcaccataatcggtactacgcgcccttgtgtactttcggttttccaaacctatcctcgacaagcggtcagcttgttgttctgttttctgcgattgtcgcacctgattacacctccgatataagttacaagttattgtcgttcagtccttcatctgattactcagactactatgacctcggctgacttctggcttactcaacgctacatcactgcaccgcttgtttctgtggaaattaaacttattcctcttgtcggaaacgtgtaggccagatctccccgggtaaggatattaactttcgtaccatgtcaccggtagctttactgaaagtaacttcgagtagtgttggactttaacttgtcatgcagtcttatccagttagttccagccttatagctacttcttgttcatcggtgcagtactttgccttagacttccttcagattccacctcgcagtggacacccttgtcctcagctcatggttccgactactacggcccatagcggactctcaccgcctagctaatacccatgccgggcgcacataaataagcgaagttggtttttaaccagcctcgcttatttattttagaaatatattcatattaacaataattttgcactttagctatttgcgataaaatccaataaccgatacataactcgcttattttcagccggaacgccatgctgaataatttcttttccattttggtgaagatcattatggtctaatggatactgatcatcatttacagcaatctcgcgaacattatctgctgtcggctcaaagtggaactgaagtccaataacattaccgttcataacaaagccttgatttttaactaagtcactactaaataataagtctgcttgagctggaacttcaaacatctcttcgtgccaatgcagagcagttaatttttggggaatatcggaaataagatcgctttttagatacaccggcgcccaaccaacttctttatgtggtgccttctttacggcataaccgagtgtcttagcgatctgttgagccccataacacgcgccaaaaattggcttatgagcatccaatagtcgctgaattaaaactcgctcttgcttgatccacgttaagtcgtcattagggctcatgggaccgccaagaataatcaacatatcagtctcatcagcagtcggcaaattaccaaactgatagggatgataaacgtacatctcatgtccgcgatcctgtgaccattcttgaattgttcctggtccttcatttggcgtgtgttgcaaaacattgattctcatcgaatatcctttccgtcgacggcaatgttgtgctaggtatcgcctgcaagtacctaagatattattgttataacatcaaatcatgagcttaacaatagtttttattcccaatattcttcatactttcgtgatgccccggttgcagcatcaacatctgctccaccattatcttcacggcgaaaaataaaaactggctcttctgcctcttgctgataatcaacggtaacaactagtcctgagaagaaccaagcatccgcaaagttaacatggtaattaataccatctttttttatgacgattgttgcctcatcgagcgtcggttctggtttatacccttgcttaggaccatgtttaacattgtgtggttgaattgttttaccataaaattttactccatttccactagcgaggttaaatttttgttggaaccacttgctagcagcatcagtaataattaattgcacttcaatcactccttagtttactatttcttttattttacaaccaagaacctatatttacctatttctgaaattaaactattcgcagtctccctctaactttgtcgtattattatttacacgtatagattaacatctttattaaatagtttcaaaggaatttatttaaactaaaatacatgttgactttataaaaacacgtgttattatagcacctgtaaattaaaaaataacaagtttaaaattaaaggagattgttaattatgaaatatgctgtaactgccgctactggtaacttaggacaagctgctgttaaagaattaaacaagttagctggtgcagaaaatgttattgttattgcccggaacactgataaggctgctaagctctttcctaataatgaagttcgtcaaggagattacgaagataagtcatcaatgatcaatacttttaatggaatcgatcacgttctctttatttcatctcaaccaggtggtaaggttgatcgtgctactgctcatgctaatgtagttgatgcattaaaggaaaacaatattaaatttgttgcctatactagttttaccgacgcacaaaattctactgctgcccttgcaactgaccaccgccttacagaaaatgcaattaaagaagcaggcattgatcactcattccttcgtaacaactggtatcttgaaaacgaaattggtttccttcaaagtggagctgctagttgcgatgcattgtactgggctaacaacaaagctggttgggcacttgaacgtgattacgcagaaggggctgcaaaagttattaccagtgaagatcctcgtgaagtttacgaatttgctggtaaaacccgtacttatgatgaattaggaaaagctctccaagaagctactggcaatgattttactatcaagcagatttcccatgatgattatgtaaaatcattagaaaaagctggcttagatactccaacagctgaacttttcgcatcattccaagacccaatcaactctggaaatcttaataaagaaagtaacgatttagaagaagttcttggacaccccgttactccacttgttgatgctatcaaagaagtccttgcacggtaaaatcatttgttcgtgaaaaccatcgaggctgagagaaaacaaagttttctctcagcctcgatttcttattaattatttttcatcatcttgaaccatctttaagctggagccaaagatctgttcaatcgtaaccgggtcacggtggtcaaagaattgactttcgttcttgttaagactagccattcttttcatatcatcatcggaaagttcaaaatcaaagacatcgatgttttcttccatccggttcttgtggactgactttggaatgacagtaatgccccgttgtaaaagccagcgaagaattacttgaccattgctcttgccatatttagcagcagtctccgcaattgcttcgttagtaaagatatcatgcctaccttccgcaaatggtgcccatgcttcaacacgaatatcttcactttgcgcaaacttaacttcttggtcttgttggtaccaagggttaacttcaatttggttgaccgctggcttaacaggcattgttaattcaagatcctttagttgatcagcgtagaagttcgatacaccgattgcacgaatcttaccttccttttgtgcttcttgtaatgctcgccaagcacccattgtatcgccatatggttgatgaagaaggtaaagatccatgtaatcaaggccaagcttttgcagtgaagcgtcaatccctgatttagcccgcttatagttaaaatcagacacccataacttagaagttacaaagacatcttcacggtttacactactattcttaattgccttgccaactgcttcttcattttggtaagcagcagcagtatcaattaaacgatagccgacttcaagagcatcggtaactgcttgttcagcttgacttaagtctggaacttggaatactccaaatccaagggttggcatttctactccgttatttaattttactgttggtacatttgtcataaaataattcttcctttctgtaattaatcgttgtctatatattaattgctaatttacaaattgaaaattactccctttacatggtagtatacaattggcgcatactattaaggagtggtctaatgattgataattacttgcttgaagaattagtgaccttcgccagtgaaaaaacacttgctaaaaccgctgaaaaacttagcgttacccagccgacagttacccgggggatgcaaaaattagaagacgagcttgggattcaattatttgaccgccagcccaaccggatcgtcctcactgataccggaaaattagctgctgaaaaagctactgaagttctcgccgtcaaccgtaattttgttcaacaacttcaaaattatgctgctcgacaatcagtaattaaaatcgcatcaattgctccgggtccattaattctgcttcgcgtaaaaagtgcatctttttctacacaaattgcgattgacaagaagtttattactcatgaccaaatcaccacttcacttttaaataatgaaaattcaataattatcagcgaccaagagattcagactgatcaaattgaatcgcgttatttagggaccgaaaatctctatgttaatcttgataaatttatgtaccttgctaattcccaacaggtttcttttaaggacttagccggattaagttttgtcgttttgaacgatatcggaccgtggaaagaaattatcaaaaaatatattccaaatgctaaatttttatatcaagaagaatgggccgcgcttactgaaatcacaaaatattctagttttccatactttagtactaatataacaacagttaatccacaacaacgtacgtcaaacgacgatcgagtccgactcccgattaccgatgaagttgcgacaatgacgttttatgctaattaccttaagaaacaaagaaaatccttaatgcccttacttaatgaaattagccaaaactggcctaatttaagttaaattataggcgtttaacttgtttcgctgaaaatccctatttaaaatattaataaaaaatgaatcatggtgactaaaatgacgaaaaaattattactcctttcaaccggtggaactattgcctcggttgtctctgatgaaggactagctccaggcgaatctggtgaagaattaatcaaaatgcttggtcggctggaatatgacattactgttcgtgatattctcgaattagattcatccaatattcaaccagaagaatggaaaattattgccgaaacgatctatgaccatcgtaatgaatatgatgggatagtcgtttcacatgggacagatacgatggcttatactgcttcaatgctgactttcatgcttcaacatataaatattccggttgtgctaactggaagccaagttcctatgaatgtgattcttagtgatgcccctgataacttacgacttgcctttgcagccgctgctaactgcgagccaggagtctatattgcttttaatcgtaaagtaatgcgtggttgtcggagtgttaaagtacggacaaccgccttcgatgccttcgaaagtgtgaatgtcccaccagtaggagaagttacttcagacggcttttccattagggatcaccagcatccccaacctggtaaaagtcaattaaatactaaaatcgatactcatgtttcactggtaaagctcttcccaggatttgatcctgccttgctccatgcaatggctaaaaatggctgtcacggaattgtgattgaagcgtatggtctcggaggaatgacctcgattcggcgaaatatggtcgctgcggttggtgaattaatccgcaatggcattccaattattacttccagtcagtgtctttacgaacgaagcgacttgacaaaatacgaggtcggacgacttgcactactagaaggagcaatcagcgcccgcgatatgacttccgaaagtgccatcactaaattaatgtggggtcttggtcaagggatggatgttaaagaaattgcagacttcttcaatactgatgttgctggtgaagtaactttagattaaacgaataagagacaggatgaaaattttgtttttcacctgcctcttattttttacttaaaaccagctacggatccagttaacaaaccgggtccaccaagactgagcttgttgcttaactgcctgcccgtcttgagaattcaagaattttttcgccttattcatcatatctcctgatgaattctttacattattaatcgtatcagttacgtgcgagctatagtctttacttgaactaattggagcattattaaactgaacaagcgcattgataattggttgttcatgattctttgtttcattgtaaatgtttcgctcttcaagtttctgattaaagattacttgaatttgattttgcgttggggtagttccttgtttcttttgttggttaatttccttagtggtatcaccaaccgcagccatcaacttaccaggatatttactatcatccttattggcttcaattgccccatttgttgcggtcaacatttggttagcagattgagtattttgctcatttaaactaactccatctgccgcaattgctttatagactccggttagagctgactccccagaaacggcccggttagcgctaacggtgatagtaacatccgtaacccccgccatttgcgcaaccatggcgtattgttgagcggttactttagtaatattatcctcaccattaaacttttttacattaactttaatccccgaacctggatcggtggggacaattgctaccgaactaaccatggcggcgttagttgtcgaaccattcggattgatatacttctgataatcactggcagtagcggttaacgttgtaaaattatcatcgactgctagcacattatttaattcattcttctcggcagcccctgctccatatacaacatatgatttatttaacgtatgagtctgggtagttgaactgctactcgtactttcactagttgtttcagccgccaaaactgtggcctggctaactggcactgctaataaagatagtgcaagagtcgaagtaataatgattttggttaacttatttgagcgcacttttttactccttttaaggcaaattaaatttatgttaatgataagaaaaaatccgccaaaatactagcggattttattttctttaccacagtttaattattacgccagtggattgggcgggagcagaaaggcgctcagtcataacttggcttggccgttaattctctccctcgtcttgcagagcttcaccgagttgcttcattcctgccttgatctggtcttcctgagcattggagtagttcaaccggaaggcaccgggctgtgggtcacctgcataaaatgggtcacctggtacaaaggccacgttatgttccagacattgcttaaaaagctcaacagtatcttctactccgggtacttcaacccataggaacattccgccttctggatcagtatatttaacaccttgggggaagtatttctctagcccctctgtcattagtgctttgcgttgcccatacaggtcactaatttgcttgacatgtgcatcaaggtcgttatgcttcagaaattctactacggcatactgggctaagttatctgtatgcaagtctgcagactgttttagtaccgtcagcttattaacaacagcttcatcggctaccacccatcctaaacggaaaccaggagcaagcgtcttggagaaagtccccatatagaaaacgtgtccggttttgtcaaacgacttaactgctggcacatgctgccccttaaaacgaatttcaccataaggattatcctctaacacataaacatcatatttagcggctagttcggccagcttttcccgtcgctttagtgccatggttcggccagttggattttgaaagtttggcacggtgtaaaccaacttagcttccggatgagcctttaatgcttcttctagggcatccatcttcatccccgcttcatccatttctacccccacaaagttggcaccatatgatttaaagacatcaagagcacaaagataagttggctgttcgaccagtacggtatcaccaggattaacaaaggccttcccgactaagtcaagagcttgttctgaacctgtcgtcatcaacacattgtctagctgtccggtcacgttttctttttctttgacacgttggagaaccaattcacggagggccgtcacccctttagcggctccatactgcattacttcttgaccacgttcagcaaacacctggtcaacagcttctttcatcgctttgacagggaaaagctcaggtgccggcaatcctccagcaaaagaaataatctttggatccgccgctgcttttaagattacaccgactgcatctgttccatctgctggcacgcgtttggaaaaattaaacttggtcattgtcgtcactcctcgtaatagatgccacatggcattaacgttatcaatctattctgcctgagctagctggtttgctcgctcttcttcttttttcaatcgttctttgatgtatgttgcggatgttgctagttttgattcttcttccggcgtcaagtccagatgcagctgctccactaccccgtcacggccaacgacagctggatatgaaaggtacgtgccgtattcttcacgataattagaaactggcatttcagttcgcgcatcattcaataatgcgttggttaaccggactgctgccgtggcaacaccataattagtgtatttcttcccttgatatacgaggtagcctccttgacgagcacgttcttctagctcagaaagctttaatccccgttcttttgctagttcagtgaccggtttccccaggacgcggactgtcgaccatgccgtaaattgcgaattgccatgttccccaagattaaaaccaacaacagagcgtgaatcaactttcaaagcttcaccaacccgggcccgcatccgtgcagagtcgagtaaggttcccgtccccatcacgtgttcttttggtaatcccgttaatttttggtacattgaggtaatcacatcacaagggttagtaacatcaactaacttaccgtgaaatccattgtctactaacatctttgctaccaagggcacttgggtccgcgtaaacttaaattcagcaaagcgatcatgatctggcgtatcaaccaactttgatttccctagggctgacacgaccacatcacaatcacgcaattggctttcatcattaacagtcaggttagtatggtaaggcaaattggccattgcatctcgtaagtccaaagcatccgcttgcaccttagcttcattagtatcaaataatgcgaggtcatcgacaaagccaccagcaactaaatagtgcgctaccgttgccccaacgtgacccattccgactactgctacttttctcgtcataataaaactccctttctcttttattgcacaactatgtaaaataattaattctagtcagtcacgtccacactcacagtgccgaagccattatcaaatttggcttcccacttgccggtagttaaatgtggtggtaagaggaaagtacctgatgatactagctgccctgcgcggaatgtcttcccttgttcttcaagctttctgactagccattgcaatgactttaatgggttgccaagcacttcacttgacgccccactatccacttctttgccatcgtggtaaagggtgacatttacatttgctgcatcatcaacggtcttaaacacctcatcggttggtcgttcttgaccatatactacatacccaccaacagcacaatcactcatgacactgaatttatttagatctgggaaccagtcagcaaaacgactatcaggtacttccagcgtgccgcagacagtagtcttatgtaataaatcttccatcgaatcactggcgtgcaagtcagttttagcacggaagccgagttcaacttccactaacggagccatcgtttgttctttgagagagagaacggcaggtgatggtaagaagtgggcatcaacttgttgtccatagagcggactatcagaatcaaacatgtcctgggttttcttactagttaaggaaactttgtacccgccagttgggagtccctttaattcaacgaaacgatcttgaagggcataagctgtattatcatcgctaacgacctctgcccattcatccattaccagtggtttcttgctttgataagcttggaaaagttcttgagcaaaagcttcttgttcttcatttaaggtaacgtttttatttgcagtcataataatatcctccttaggacctgaccgctgttaccaattaattatcggtctaagccggtcaggtcatgttctaatttttcttcaatgttaataatgtctgaaatatcactgtctgccatgaccaccaccacctttaagtatgtctaataaaaaacgccctcctagctctattaagaactaaaaggacgtctatcaacgtggtaccacctttatttacaacacaagggttgcctcaatcaactgcccacaatggcaattaatcggcaagataatggctgctaccagtatgttctactattatttcgacatacaactcgcgagggatttgtcgcaactacctcctaccggtttccaccaaccaccggctctcttaattcagcagaattgacgattctcggtcaacgttttttaatttctcttaattgattattagtagaatatcacgtgaaaatgagaaaagcaagagttaaattaaaaaatcattaaaaacaatattgccatggatcgttattcacaaaatatgcacagtatcaactaatttgactcttcccacaagaatttaatcaattcacggtttacttgactgttattgtggagcttactgtgctgggcattctttccatgaatttcaacttcgcgatatgatttgcacgatcactgactaaatactttaatgatttagcagaatttaccggtacatcttcgtccgagtgactaccatccccaacatccccataaatatttaacacggctgtatttttcggaaaggtctgccgtaaaccaagtaattcgcggtaggcagagtccattttctctagttcgccggtctttggatttatcttagcattttgcgtctcactttgccctaccagtccattatagtgtccagcaatcgctactaagtgggctacttgcggaaagcttttatcatttacattgtcattaatataattgataatttccaagtttcccattgaatggcccacaaggttaatttgcttataatggtgttgtttttctaaagctaataccacattttttacatattcaccaccatgatgatagccctgcgtgtaattatctcgatatgcacttaatttattatcttcaaggttgacttccacaataggattaacggcatttgcgggaattgggcggtttcccttttttgtcaacattcgcccgcacaattgtcttggttacaccggcatcacgggccgcattagccattttttcttcggcatgagaactgctcccccagccatgcacaaaatcgtcggtgttgatgattgaatataatgggttacagcatgtgctcgtgaacttattcctaataggccaactaaaataacagcaaagcctaataataattgagaatactttttcatctaatcttcctttacaaaagcttcatcaaagaattgtttaatcttattaaatggtattttatcaactcgatcataaaggtcaatatgttcacaatcatctacaacatacatctctttaggttcttttgctagcttataagctcgttcagagaaagcacgtgaatgagcatgatcaccaaaaataaaaagaattggccgtggggaaatctcatcaatataagctaatgctggaaattgcatcatggcaaggttagaagtagtagtgaaatttccacgagcatgagcatgaaaaccacgaggaacagcataaaatcgattccattcattagtaatcggatcgatttctggcaatgcatcaacattcgggtaaggtttagttgggaaacttggcttatattcaggaatcccgcttgcataatcttcccagcgctggttagctaactcttctttcattttatttaactcttcatcgcttaggttcatcatcccacgaacatcagtaatatcatacattgatgcggtagcaacggctttaatccgcggatctaccgcagcagctgctagtgcaaagccaccagaaccacaaattccaataaccccaattttgttacgatcaacaaacggaacttcaacgccaagaaaatcaaccgctgcactaaatgattctgcaaataaacctggggaggaaacgcgacgtggctcgccagcagaatctcccatattggcttgatcaaaagttaatacaacaaagccacgctgagcaagttcattaccatacacggctggtccttgttctttcaccccaccatatggcgcaccaataattagagcggggtgcttttctttaatatctaaacctttagcgtaataaaggttaccggctaattctaagccataacgatttttaaaattaatactttgccgttctacgttttctgataatggtgtaatgtatccaaatgacatattattctcctccgatttttttaattactttagcaggaacgcctgcaacaacagtattggcaggaacatctttactaacaactgctcccgctgcaacaacagcattttcaccaactgtaacgcctggtaagattgtagcatttgcgccaagccaggcattttccttaatgaggactgatttcaattcaacgccgcgtcgcttttctggatcaaggggatgatttaccgaaatgattgttacattgggtccgactaaaaccttatcttctaattcaattccgccgagatcagtaaacatcgcaccactgttaataaatacttgtttcccaattttcaggttagctccgtaatcactacggatcggcaaacgaatttcaaccgaggcatctattttttgaccagttacatcattaaggacatggcgaatttctctttgcgatgctgaccgactattcaattgttgaagtaagtcttgattttttaaagccgttgccgtgattgtcgcaagttcttctttttgaatctctttcattttcatccctcttttgcttgaaattattgtttatatcttatcgagtttttataataatgttaaatacttatatttaatgacatactatagttaaaaagcatattggagtgattaaaatggaagtccgtgtactgaggtattttattgaagtagtccaagaaaagaacatttcaaatgccgctaaaagattacatatttctcaaccgacactatcacgacaattaatggatcttgaaaaagaacttgggattactttatttgaacgaggacaccggcaaatcaaacttacccaagaaggctattatttatatgaacgagcgcaagagattactggcctcgttgacaaaactgaaaccgacctgcaatcacaaaatgtcataagcggaacattagatattggtgcaggagaaagtgcagctattcagccagtaatgactgtaattggtgatattatcaaaaagtatccagatgttaagattaacttagtaagtggtgatagcgatcaaatctatcagcgcttaaataacggtaccttggattttggaatcataatgggaccagaaaagctcctagattatcattcaattagattgccgcaaaagaatatctggggaatcttagtccgaaaagatcagccgattgcagaaaaggaaaagattactccggaagatctaaagggtgtccctattattacgtcagctcaatctaaagagcaggatgtgtttcgggtgtgggctggttcattaattgatcagtacaactttattggccagtacaatttaatttttaatgctcgtttattagtcgaaacaggagcgtgccttgcattaacctatgaaaatctgatcaatatcactggaactaatcttatcttccgtcctttaacacctactattacagatcaaaataatctcatttggaataaaaaccgtcaattatctaacgttgcgcaggttttcttgaaccacttaaaggaagtacaagtagtatagaataaagccttttctctcaaacactggcttttatattacttccctatagaactaatatgatctattaccattgtttaaaaagcaaacgaccttatcctaaaacgaataaggccgcccaaacttatatgactaaaactctaaagtacctttcaactactgctgtctataggtcttgaagttcttccatatggtctgctgttttttgatctaattcattatgctcatcagtaaaatcattgtaactaccactaatattagttgcatgattagcaaaatgttttaagtctaagtacgatttatggatagtttccttgtcggatttctttacagaatcatttttctgaattttttgatctaggtcatgcaggtcattaactttactatcaatttcatcaatctcgtcggtatgattactttggatagtatcaacggcagattctacatcaaaatcatcagaattatctattgcatcgctccattcttttccttcttgctttgaaagatcttcaaccttagaaccaagtgtgccgtattgatcaataaaatcttctttatcatccttataatttgatttgttcttttcctgttgttctgtagcttgttgttcttgagcttcatcaatacttccctgcgccattccagcaattagtagtgaaataatcattactataagactaatccaaaaatattttttatttttcccgaaatgtcaatttaagttagaaagaaagtagttgctcatcagtgacgtaggacatgaatacctcatatggagttcgatagcctagtgatttgcggggcaggttatttcgcttactcatcagttgggtcaccaattcatcaggaagattgcggaaatctagctgttttgttaagccgtcccggcgtaaaagaccgttgttgttttcgttcagccctcgttgattgggagcaccaacctcggcaaagtaagtgtgaaggtcaaattgattggcaatctcgcgccagccggcgaattcttttccgttgtcaaaggtaatcgatttgaagaagtgctgcgggaatttccgaagccactgacctaagtgttggttaatcgcatcagccgtcttttcgtgcacattgagtacaatttcgaccttcgattggcgttcggtcagggtcattaccgccccttggtgctttttgccttggacggtatcagcttcaaggtgtccaaattcagtggcatagtgcggaaagtccttggcacgctcgtgaatacttcgccccaattggccagccttcccgcggcgctcaatatagccattcgggtgccgcttacctcgcatgggcaaagcacggacatccaaaccgaactgcccccgttcaaacatccggtaaagagttcgccggttacaactaattgggcgctcagcgcgcccaataatggtgtcaggcgtccacccctgggcaattttgtcgttgatataagtaagttcagccagtgacaactgagtacgttttcggccacaacgttgcttattgcgcatatagtgatcttgataatcagcaattgaggcaccggtttccaggtaacgataaacgcgataaacggtttcggcgctacggttgatcatttgggccactcggtacgctttaagcttttgcacgaaagaatgggcgatgattgtcagctcgtttgtggtaagatgggtgtaagtcatttgtggtttcctttcttttgtttaggggtattcaaaagtctaccacaaatggcttttctatttttctaacttaattttacaaacggcgtttcttaagagattcattttctttatcttttcttcctttaaaccacctaataccatagacaattgcgactataaacgtaataaaaaacaccaaatcaaataacgttaccaatatctccatataaatatcctcctcaaatatacaaaaatggtcaaccagcgtagctaattgcgtcgattgaccatttagttttaaaactcttacattttaccaaaaattccttaaactgcatatgtttaatacaggaaccaccactaatttgactaatcagataaaattttagattaatagtcaaattcttctttcatatcatcaaaaaagcgctgaacaactggatttcccagcttcagcgcttctctttatttaaaattaagtgagtcaatccagccgtcaatttggcgtgggtcatttaaaattgccccttggttgactttggtatcataaccattttcattaaccgttcgttcaacatagttttgtgagcgatcatagcttgttccaccagaagtagcaaatagtgctaaattcttcccgtttaaatcaagatgatcaatcaccgtactaatcatccgcggcgggatagcccaccaaatcgggtgcccaatgacaatattgtcatagccactaatatctggtaaatcatccttaatatcaacccggctattatgctcgtgctgttcaattgatgtccggcttcgatcatcatgccagtttaaatctgcatccgtatatggttgtgctggatgaatttcggcaatatctgcatttaatttttgagcaatctgttctgcaatcttcttagtagtattggttgcagaatagtataaaacaagggtctttgccattaatgaaggcctcctttatcttaaaacgcagtataaattttaacgtaaaaacgcaatgatggaaaatgcttataattaatccttatctatgctttaaaagtattaatcgttagcgtgaatatcatatgcatttaataacatctcaccaacaccaggcgcatcaggatcatgcattcccttgcctttatcgagggcccgaatttgatccatttcttcatccgttaattcgaagtcaaaaatatcaagattactcttaattcgtgcttcgtgaacagacttagggaagacaacaattccttcttgattttcaaagcggagaattacttgaccagcattcttaccgtatttttcagcaattgctgtgattactggttcatgcagtaagtcagcattaccttgtccaaggggtgcccaggcttcaagacgaacatcatccttcgcaagaatttcccgtaatttcttttgttggaaataagggttaaattcaacttggtttaccgcaggagttacatcaaagttagggacaaacttgttccaaagtttaggtgtcatgttggaaacaccgattgaacgaagcttaccagccttttgtgcttcttcgactgccttccatgcttcgtcaaccgccccatatggttggtgaagaaggtaaaggtcaatataatcaagccctaatttgttaagagaagtttcaatagccttctttgcgtcttcatacttgtaatcttgaagccacatcttacttgttacccagatttggtcacgaggaatcccgctatccttgattgctttcccaacttcttgttcattcatgtaggcagccgcggtatcaatatgacggtaaccagcagctaaggcatccttaactgcattgtatgttgtaccatcagcagggatttggaaagttccaaaaccgattactggaatttcattgccatcgttcaatttgaaagtaggtacattatatatagacattatttttcgtctcctttgcgttaatcattgtctaaatattagcaccatattttctaaactaacattacttgattatcatatcagtatgcccgaaacgtatactaattgagtgaaggatatgggaaattttaaagtaaggatttaaaaacaacctgagaaaaagcttttattttttcaacagcctcgttattttatacgaatattgttacgatatcatggcactggctgcgcgtcgccaaaagactcgaagctaagtcccctgtgccgtgctaaaccccattctatccttagcccctctttgttgaaaaattaattcacactcacctacttttcaaatttaattcttgctcatatcaataattactttacctttattatgtccctgctgaacttttttcatcgcttggggaacctcatctagtgaaaagattttgccaaccgtgggatgaatttgattttcaaccaagatcttgtttgcagctgctaattgttggccattagctgttacgaataaaaattgatagtctattttctttttagctgcttctttttcaatactacgggatgcaagactaaaaagtccttgtttgaacttgctcattttcattcgtttagcaaattccttattaggtattccacgtaaagatacgagtttcccatgaggacgtaaaattgccatctgcttaattgtttcttttccacctaatgtatctattactaaatcaatccctgaaagaacttttgtgtaatcttcttttgtatagtcaataaatttattaaccccgagttgttcgacacgttgctgattttgtggactaccactagtaatcactttgagtccttttgctactgcaattggaatagccattgcaccgaaacttcctgtcccaccagaaataaataatgtctgacctggcttagcttgtaacaattcaagagcctgaattgctgttaaagcagttaaaggaacgccagccgcttcttgattggtaagatattccggtacatgagcaacagcggattgattaaccactaattcttcagcaaatgcaccaatattatttaagggattgcgtccatatacacggtcgcctaccttaaaattagtaacatctttaccagtttgttgaacaagtcctacaaattcatttcccagtgtttgcggtaatttatatgggacaactaatttcaaatcgccccatgctattaaattatctaatggattgacacctgccgctttaacttgaattagtaggtcgtaaggtccaagcggcggcaaagaagcattgctaattagtatttgtggattctttttattgtatttagtaagttgagctactttcataataatcctcacttttttcttatctttatcaaccataacgaattaagaaaatagcgtcaataaagtagctctaacatgtatttcatgcttgctttctagcattatatctttcaatgtcttactaacaagacattaatcgcactattattcaaaggcttttgtcttgccttattttattagttacaaataaaaactgctagctattcattttttgcattattgcctacttaatattggtattttaaattttatctttctaggcttatagtaaaagtaatcaaaattacgattgagaaaggaagattttcatggctaagaaacaaacagctggtcgcgaccaacttggtaatttcgcccctaaatttgcagaattaaacgatgatgtattattcggacaagtttggtcacgggaaagggaattaagccttcgcgatcggagtcttctcaccgttaccgctttaattacaaaaggtgcttttgaacagctcccttaccacatgcaaactgctaagaacaacggcattacaaaagatgaaattgcggaaattattactcaattagcattctacgttggctggccaaatgcttggtccgcattcaacgttgctaaaaaagtatgggatgattaaaaaatcaatttaaaacgtgcctttaatggcgcgttttttattttcggcctattataaaattaattaggaattgtgaggtaattaggatggaagaatttaaagaagcttattatgatggtgaacgtccactttatggtcttcaagatgctcatttagtaaacactacttttggtaagggtgaatcaccattaaaagaaactgctaacttaactctcgatggcgtactctttacatggaaatatcctctttggtattccgatcatatcaaagtaacaaataccatctttgaagaaatgtctcgttctggtatttggtatactaacgatattgaaattactgacagtacaattcaagcacctaaagaatttcgtcgatgtgatgggatcgttcttaataatgttcactttacaaatgctgctgaaacaatgtggaactgtaaaaatattaagatgaaaaatgtatatgctactggtgattatttaggaatgaatagcgaaaacatttatgttgaccatcttgatcttgtcggaaattatgtttttgatggcgctaaaaatgttgaagttcataactcacgcttagtatcaaaggatgccttttggaactgtgagaacgtgacaatttatgattctaagatcagtggtgagtaccttgcttggaataccaagaacattacttttattaactgcacaatcgaaagcgatcagggattatgctatgttgaccacttaacgataaagaattgccgggcattacgaactgaccttgcctttgaattatgtactaatattgatgccgagctaaaaggtactattatgagtattaagaacccaattagtggtaaaatcaccgttgatcacgctgatgaaatcattatggataatcctaaaattgatccaagcaaaattcaaattatccaaagaaagtagagggtgaaaaaattatggaatatgatttcgatacaattctcgatcgacgtcacaccaattctgaaaaatgggacgttaagccaaatgagttaccgatgacaactgctgatatggacttcaaaactgctcccgaaattatgactgcaatgaaaaagaagattgattcaggcgcttttgggtatgaatatcctagtgaagaatactttaatgcggttgcttcttggtataaaaccgagcataacgcaaaagctgatccctcttggatgcgatttgcgactggtgtcatcccttctattactgcctgtgttaattatttaagtcatgaaggcgataatttcttgttaatggagcctatttacaatactttttacaattctatcctcaacagtggtcgtcatgcttttcctacccaactaaaatacgatcattctacgtatacttattctgtcgattgggatgaccttgaagacaaaatgagtaacccgcttaccacgctgatgattttatgtaatcctcacaatcctactggctacgtttggtcacgcgatgagttaatccgaattattaagctagcccaaaagcacggcatcattgttattagtgatgaaattcatggtgatttagtattaacgggtccagactatacccctactttctccttgccagaagattgtcgccagaatgtagttacattagtgtcaactagtaagacatttaatgtggcggcccttcatgctgctacgggaatcgttcctaatcctcttttgcgagaacactttacgcgcgcaatcaataagtatgaagttgcagaaccaaacctcttagcaattcctggaacaatcgctgcctatacacaaggcgcagactggcttcatcagcttaaaaagtatttattaggaaatcgtgaatatcttgttgaatttattaagaaaaatcttcctaaactccacgttgttcctggaacagcaacttatcttgtgtggatcgatgttagtgaagtaaccgatgatagtgctactttagcgcaaaaaattcgtgaaaaaactgggttaattattaatccaggaacctattatcatggcaatgggagccactttattcgcattaacattgcctatccccgtgcacaagtaaaagatggcttagaacgattagctgctgctattaaaaattaaccattaataattattatcagtaattaaaactattttcctcttggcttactaagaaattaatttattttttcgcgcttttaaatatttggacaggaatgagtgagcaccaatatcgcgaaaatcatcattaaacataaaattgtaataaaatcccccgcatgcaactttcacacatgcgggggattttattaatgatcagtttcaacctctaatactttcttcgatccagcatcaatcttaacttctttaactgttcgtccatcttttacttgaacttcccacacagcctgattttctttttcttgttctaatttccattcgataggactacccttcttagttgctttttctgcaatttggctcgcctcatcacgactaattgtcttacttggatctaatgtatatttcttatcatttttatcaagcttttcagatttattggaaattactttaccatccttggcattaactttgaccttatactcattcgcattgtcaaagccttttattgtatatacatatttaccattgtcactttctaattcaacttcattgatttgcttattttgatacttttgattaaatttatcaattgccgcttgttgatcaatcttgatatcactcttcttagctaacttttcatgtttaacagctgcttcgatttgatcatgatggccatgtattgcaactaccccaactgtgcctcctgctcccaacacaatcccgctacaaatacaggcagtaataagcattttcttagtcatttgaggaaatttccttgattttttcttatctgagtttggttgatgatcttgtcttttttcgattttttccgtcatttttattcttcccttcttaactttagttggtaattttattttacgaaataatctgccaactaaaaccaagaacaggtgaaagtatgatgaagaaatcttcatttttgtttaggaagataaactgtaaaaatcgttccaactggttcattgtcgcgaatcataatttttccgtgatatttttcaataatcattttaacaatcgaaaggccaatccccgaaccagcaaccttattggaatgcgattcatcttcacggtagaatctctcaaaaactttttggcgattttcctttgcaattccctgaccttgatcagtaacttttaaaactatttggctatcgtctgccgttaactgaacattaatcgttgaattagttggtgaatatttggccgcattttctagcaaattatgaacaagactttgaaaatcaccttttgttatgcggtaagatatattcggatttaagtcagtaataaatttttgatgatatgcaccttggagtgactcaacttcagcgaaaacaatttttgacaagttaatttctgttagttttttagtctgatgtccttctagaataagcagttcatttattaattgactcatttgctgtgcttcttgatcaatgtactttaatgacttggcaattaattctggatgcttatccccatgccttcttattaggtttacatgtcctaaaattccagcaagcggtgtcttcaactcatgagaagcattcgcaataaattctttttcgcgttgcattgtacgatactgccgtcctagcaaatgattaaaagactgggcaacctttcgtacctctaatggttgttgcggaaccgttaaagttttcaatcgattgctttggggcgtgattgcatcaatttcattatctaaattagtcaatgtttgtgtccatcggcgagctaaacgatgaatgatggggagagcaatgatacttattgcaaggttaattaacagcgtcactatcaaaagccagcacgttaattcgattaaatcatcaacattaattgctactttgacgattcgattatggtctattttttgctgccgtaaataatagactccatgccgggttaactgtagattcttgattgctaaattccgctgatcaattcgcttaaatattttatgggctttgggggagatatatttttgttctccatcagtgatctcaattgcgtcatcgtcttgacgagcaacataagcatttaaaaaagtttcctgattcttgtttctaggccaatcttcttcaattgtttcaattacttcttctgcctgctcatcagcatagcgatatattaaatcagcagcagtcacaacaaaaagaaagttaataattaccaaaattgttgcaaataacgttaagaaaagacgagttaattgccgtgatgcggttattggacgtgtgttgttcattgctcatcacctaatacataaccaatcccccgcacagttttaattaaatcacggtacttacctaacttgttgcgcaaagcacggatatagacatcaacagtattggtctgaccgtcaaaattgtaaccccatatctcgttaagaaggtcatcacgggtttggacaactcctggttctttaatcaaggcagccatgagggaaaattctttaggtgttaaatgaacttgttttccatcaaccataaattgatgtttcagtaaatttatttcaaatggtccaaaattataatcatgtttttctgctttttcttgccctaatcgtcttagagcaaccctaattcgtgctaaaagttcctcaatttcaaatggtttagtaatataatcatccaatccttgatctagcgccatgctaatatcagaggtttgactacgagcagtaatcataataattggaacattactcgactgacgaattcgtcgtagaactgtgagaccatcataaaccgggagcatccaatccaataagattaaggttatttctttctcgttaaatatttccagtgcttctcgcccatcttttgcccagataacttcatatccttctagttctaattcagttattaagaaacttgcaagactttcttcgtcttcaaccaacataatgacagctttcttcattattttgcctccaattatttgtcctatatactattttagctgttttgattgcaggcaaataaaaaaagtttcatatgaaacttttttactgataattagaatttttgttcaagccgatataaatcattcaagaaattagcaacaatatttaattcatccattgaatattttgcggttagtttatcaaccaacttagtctttattatttcatgcatttgatcatgaacttttgctacttttttcccatcctaaatttcaagaataagttagccactggactcaaataaataatactgaccaattgattattggttgatggagctgtgatatctcttggtagaaggccttacgatagatatccattgacgaatgtccattaaacatagctcgtggatagtgattcatccaatcattagtcgctatgatctgagcactactatagttatttatagcttcacctttggtaatctccttgcggagaaaccggttattgatctcattggatccacgttcccaaggggaatacggatcagcatagaaaacatgatcgtgaacttgtgttaactcactaaattctgaaccgttgtcagaggttattgtcttaaagatgcgatagtaagcatctgtgcccattttctggcgtaaatttataaagaactgatttactgcatgcgcagttttaccagcaattttactcgtgatattaactcgtgaaaggcgatcagtcattactagtacaacactgtcattaccgtttttctgtccctgaactgtatctagttcccaatggccaatttcggaccgttggtccgcagtttgaggtcgttgagcaatattaggacctaagcaccttttagcttgcggatgagttcgatgatgcttacgtttaggcttttcaaagaggtctaaattggacgtacgaagcacaccctcattaatccattgatataaagttacaaccgactttgggatcagggtgccatcattcattaaatctcgagccttataaataaccgcttgtggggagtaatggtggtcgtcaaactcaccaagcattagctgatcagctaatcgtaaaaattgctttgaagaataatataagcgacgacgaccagaatggcggtgatgttcaagatatgtggcctgaccagcttcataactatagatgtagtaagaatattcgtaaatcttaccattagatttttgacgacgaagttggcggaccgtaccacggttgagctcgttattaattgtttgatgattaactcctaattggcgaccaattgcgcgattggaaagtccttgcgactttaaagtcgcaatcatcacacgttcttctttagtaagatgagcattctttttatgagtagtcaataaactagtagacatggtatcatttaagtgcgtcatttgacggacatcctttcatataggtttggttcacttaatatgatacctgatgtcacgccgaatggcgttttttatttaccaccaactgggtggctaacttcattctataatccaccacttttttcccattactcgttaatgaataatatattttctttttatcatcaggatgttttactgaaggaagtgatgcaatgtcgatggggcaaatttttaaccaggtcgtcattattttcttactaatgcttttaggggcagttattagaaagctcggatttccccatccgcaatcaattaatgacctaacaaatattacactctactttttatcgccaatcgtaattattaaggcctttgaacagccgttttcgcgatcacgattttatcaattattactattaattgttggtatctttttgacctattttgtttccattttgattgcaaaactactttttcataaagtaaaggaccaaaatattcgtcaaattgcaacttatggaagcatctattctaacaatggttttatgggcgttccattagcacaaggactttttggaagtgtgggtgtcttctatgctgtcgcttcaatgattggttttaatgtcatgtcatggacccagggaattggaatttttcaaaaacggcagcctcatgattggagaacacagttaaagaaaattattttaaatcctaatattattgctattattactggtcttttcctattcattagttcttttcggttgccaaaattaattgctgattttattgattacaccagtccagcgtttactccactatcaatgattgtcatcggaagtaatcttgccaatctaagtattaaaaatatcaaattaccaactgtactctggggaagtctcttcgtaaggaatattttcttcccaattctagggacaattatcttattattattgggaatcaccggtgttccactcttcaccacagtaattcttagtgcatgtccagtagcaggattagtcgttctttttaccttacaatcaaatggggatggacggccagcaaccgtcttaatgagtatttcaaccattttgagtttagtaactattccattagtctattggtttgctagtttgtggtaatgatatatacaatctttgaataaagtattaaatataataagcatttcaaataacagcctccttaatctatgatggaattagatacgtggaggctttataaatgaataaaccatatattacaattgaaaattaaatgcataggatcgggttaaattactgtgattctatgcgtttgtgctttaaaaacaagaaaacgcaagaactctcgcacacactttgggtatttaaaccaaagtagcgaaggggcttgcgtaatgaaatttataaagttgaagtgcaagataaaaaggtatgattccaatatccaactgggatcataccttttattctctagattactgctttttaagtttctttagatagaaaaacaagataaacaatcctattactatacacgccaatgcacctggccataaatctattcgaatgatcaaaataaatatagcatataagattattgctattccttctaagaaaaaacattgtttctttaaacaactaattagccataatattgcacaaagtaaagaagatgtagaagcaataatattcttattgtatgcacaatatacacaaataatgaaaaatattaatacttcaattatattccacttattcttttttaaaaaggtggattatagaatgaagttagccacccagttggtggtaaataaaaaacgccattcggcgtgacatcaggtatcatattaagtgaaccaaacctatatgaaaggatgtccgtcaaatgacgcacttaaatgataccatgtctactagtttattgactactcataaaaagaatgctcatcttactaaagaagaacgtgtgatgattgcgactttaaagtcgcaaggactttccaatcgcgcaattggtcgccaattaggagttaatcatcaaacaattaataacgagctcaaccgtggtacggtccgccaacttcgtcgtcaaaaatctaatggtaagatttacgaatattcttactacatctatagttatgaagctggtcaggccacatatcttgaacatcaccgccattctggtcgtcgtcgcttatattattcttcaaagcaatttttacgattagctgatcagctaatgcttggtgagtttgacgaccaccattactccccacaagcggttatttataaggctcgagatttaatgaatgatggcaccctgatcccaaagtcggttgtaactttatatcaatggattaatgagggtgtgcttcgtacgtccaatttagacctctttgaaaagcctaaacgtaagcatcatcgaactcatccgcaagctaaaaggtgcttaggtcctaatattgctcaacgacctcaaactgcggaccaacggtccgaaattggccattgggaactagatacagttcagggacagaaaaacggtaatgacagtgttgtactagtaatgactgatcgcctttcacgagttaatatcacgagtaaaattgctggtaaaactgcgcatgcagtaaatcagttctttataaatttacgccagaaaatgggcacagatgcttactatcgcatctttaagacaataacctctgacaacggttcagaatttagtgagttaacacaagttcacgatcatgttttctatgctgatccgtattccccttgggaacgtggatccaatgagatcaataaccggtttctccgcaaggagattaccaaaggtgaagctataaataactatagtagtgctcagatcatagcgactaatgattggatgaatcactatccacgagctatgtttaatggacattcgtcaatggatatctatcgtaaggccttctaccaagagatatcacagctccatcaaccaataatcaattggtcagtattatttatttgagtccagtggctaacttattcttgaaatttaggcttattcttttttaaaaattaatcaaaatcatcaaaactccccatgatagtcgaaataacttttccctccgactctaactattctagaagccagttcagcctctaaaataaaatataaagaaaactattccaattaagatcaaaattacagaaactatccatgtgcttggatgaactataaaaagtaataatccatatattatgaaaaatagtgcttgcagatataaaaatttcttccctagattactaattaatagtgaaagtccacaaaagattgacatcgatatcatgccaaaattgtaatcaaatattaaataccccgaaatgtcaatttaagttagaaagaaaatagttgctcatcagtgacgtaagacatgaatacttcatatggagttcgatagcctagtgatttacggggcaggttatttcgcttactcatcagttgggttaccaattcatcaggaagattgcggaaatctagctgtttcgttaagccatcccggcgtaaaaaaccgttgttgttttcgttcagccctcgttgattgggagcaccaacttcggcaaagtaagtgtgaaggtcaaattgattggcaatctcgcgccagccggcgaattcttttccgttgtcaaaggtaatcgatttgaagaagtgccgcgggaatttccgaagccactgacttaagtgttggttaatcgcatcagccgtcttttcgtgcacattgagtacaatttcgaccttcgattggccagccttcccacggcgctcgacatagccattcgggtgccgcttacctcgcatcggcaaggaacggacatcgaagccgaactggccacgttcaaacatccggtaaagagttcgcaggttacaactaattgggcgctcagcgctcccaataatggtatcaggcgtccacccctggtcaattttgtcgttgatataagtgagttcagccagtgacaactgagtacgttttcggccacaacgttgcttattgcgcatatagtgatcttgataatcagcaattgaggcaccggtttccaggtaacgataaacgcgataaacggtttcggcacaacggttgatcatttgggccactcggtacgctttaagcttttgcacgaaagaatgggcgatgattgtcagctcgtttgtggtaagatgggtgtaagtcatttgtggtttcctttcttttgtttaggggtattcaaaagtctaccacaaatggcttttctatttttctaacttaattttacaaacggcgtatcaaaaaaattctctaagtcctttagttaatgaagacttagagaatttttatttaaagatctctcattccatataattatggagaatatcatccgaagctgcctttaattttagataatcgatattattagagaatagcataatcattcgtttcgtcttgtaatcagcgacaaagcaactgttatatccaggaatactcccatttgcgcgaataacgtccccatcaaagtaaaccccaccaaaataggcaacttcttgatgctgcgcctgttggtagtattcattgatcattttgggatctttcagcacctcattatatacaaacttccagtaatcatttggcgatataaaaaggttccctgccccaaagtctgaggaggtcgttacagttacccggtgccaatcaactgttggatccattggttgcggaatttcttttttggaaacctcagaaaaatctttaatttggtgaagatggagcggtttagcaaagttttttcgaatataggtattatagctttgatgcgtttgcttactaataatggctgccaagatttcataatcaacatcttgataatcccatgtatgcgtataatcatacttgagatgtttaagcatataagcaatttgggctttttggcctctaagtggttcaaatggacgatcattattaatcaagccactagtatggttcattaattcccgaatcgtaatatctttactgccatcaatctgcgggtaatacttacttagcgaagtgtcccaatctaattgctttttttgctttaattgataaacagcggttcccgttacaatcttttgaagcgatgccgtgggaaatagtcggtccgcctttacgatctgatccttattcgtggtttcattattttcaatagcaatcgttttccaatctttgccattaactagcatcaccccattaatatgatggtccttcatataatcttgaagttggtgttgcgtttgtttgtcaactatttctgcctttacctttgatggcgtggtcaataagaagatagcaaaggaacaaagcgtcaaaaaaatatacaagttaacttttttcataattataagtattccttccaggcatccgttttcgaaaaaatatctatctgtattatacaaattttatcccccatcttacaaagtagaataaaatctgatttttattactaaaacactttaaattcattcgatttatgttaaaattctaacgtcaataaataaaaaacgcaaaaatagttcgtaaataacgaacattatcaagggagagctagaatgaataacgacgtcgaaaaagttttatatactcaagatcaagtcaatcaacgcttagatgaacttgccaatacacttactgaaaaatatcaagatgaatttccagttttagtttccgtaatgacaggggcaatgattttcactagcgaaatgatgaagcgccttaatttcaagttaaacgttgattatgttgacgtctctagttacgaagaaagttcaaaatccactggaaaagttaaattaattcaagatctttcccacaatattaagggtcgaccagttattattatggaagacattattgatactggtcatacattaaagtatcttgctggtcttttcgctgatcgtggcgcgaagagtattgagatttgttccttacttgataaaccggaccgtcgtgaagttaatattgaagctgattacgttggttttaaagttccaaacgaatttattgtcggatatggcctagactttaatggcctttaccgaaacctgccatttgtcggtgtgttaaagcgttccgtatatgaataatagttaaaggctgagagaaaatgttatttctttcagctttctttttggctttaaacatctaaacgcgatatagtacagttaggctaataaaattgataataattgatttttggtaaaggaggggtaatcattgcttaggcttgactggtgtttacgaatgctcatggctgccttatgtggtggaatcattgggtttgagtgaaaaagtaaggctaaaatggctggaattcggacccatgccctaattgcggtggggggcggcaatggtcatgattatttctaagtatggcttttttgatttactgaaagttacccatagcaattggaacgttgacccatcacggattgccgctcaagttgttagcgggattggttttttaggtgctggaacaatcattaatcgccacgatgaaataattgatggcttaactacggcggctggaatttgggttaccggcgcaatcggtcttgcctatggtagtggtttatacagtattgggattatcggtacctgttgcgttcttttagcagaagttattggaaaatatctagatcagtttgcacttagacaaggtaaaggattctcctgctttattcaattagaaggaaatactgatgatttgcatgcacttattaatcagctaaacaaaaaatattttgaagttccgcttaaatactcgatctatgattatggagacggaaaaatctcctgtcaactttatggtgaattaagatctggcttcaaatcagaaaacatctttactgaccttactgagctgggcaacattaaaaaagttgagttagaataaaaacataggaagtgacaagatggcttataattttagaaaagagtagaaagaattgtatgtccccggaaagaatcccagcctaatcaatgtaccaatgatgaagtatcttgctgtgcggggacatggggatcctaatcaagaaaatagtgagtataaaaaagcaattgaaaagctctatgctgttgcttataccattaaaatgagcaaaaaaggcacctaccaaattccagattattttaattttgttgttcccccactagaaggactatggtggcaagatggtatcactggaattgactacaaagttctatttcattgcaatgattcgccttcccgactttgttactcaagatgtttttgaatgggcaattcagaaggctagcgaaaagaagcagctcgatttacataacgtagaattcctgtcaatgcaagaaggcctctgtgtgcaagtacttcatatcgggtcatacgatgatgaaccggcaacaatcgacaaaatacataaatttattgcggaacaaggtttacaagtagatattaacgatgatcggcatcaccatgaaatttatttgtcagatcctcgccgtaccaagatcgaaaatctaaaaacagtattacgaattccggtaaaaaacaattaaaaacactattaataggtgatcctctattagtagtgctttattttttgccttgaccggtgagtaaatactcactataatgaaataaaaaagtaagcatttactcaccaaacagaaatgagggaactaaatatggtagaccttattcaacttagtcacttgagtaagaaattcggtgaccgtaccattcttcatgatattaatttaaccgtcactcccggtgaaattgttgggttaattggaccctcgggttcgggaaagacgactgcaatcaagacaatgttaggaatggaaaaagctactcaaggaactgcacttgttcttggcaaaacgatgccaaatcgaaaagtacttagtaaaatcggctacatggcgcaatcggatgccttatacgaaagtctttcggctaaagagaaccttgaattctttggcaagatgaagggggtaactggcagaaaactctccgaagaaattatccatgtcagtaaagttgttaatcttcaaaattatctcaatcaacgcgttagtggttattctggagggatgaagcgacgactttcactggcaattgcgttgctcggacagccagaactattaattctcgatgaaccgactgtgggaattgatcctgctcttcgccgccaaatttggcaagaactccttaaactgcgtaatcaaggacagagtattcttatcactactcacgtcatggatgaaacggaacttaccgaccgagttgcgctacttttgcatggggatgtaattgcatttgcttctccaacagaactagaaaagcgatatggtgtaccaacgattgaagatgtctttctaaaagctgaggaggaagaagcatgagaaccctagcaatcactaaacgcgtcttaaaagaactatttcgtgacaaacgaaccttagcattgatgtttttagccccaatcttaattatgtggttaatgaacgtaatgttttctgctagttccaacactaacgttaatatttcaacagtaaatgtcagccagtctattgaacgtaaccttaaaaaagtggatggcgtatctgttacgcctagctcgattgaacacgcaagaaaaaagctaaaagataattctacagatgccatcatcgaatatgatcaagcaaaaaacaaatataatgtgacctatgcgaatactgactcaggaaaaacggtattaacaaaacaggcattgaatgctgcgattacaaaaactaccattagctcattagcaaatggtgttcagcaattacaaacaattgttaaaacgacaaatcctaatataccgattgcaacagctaattctggcaattcaccaacaatcagtaatcattaccaatatggcgatgccgacactggcttcttcgctaaaattgtccctattttgatgggattatttgttttctttttcgtctttttaatctctggaatggccttattaaaagagcggacttctggtactcttgaccgcttgcttgcaacgccggtaaaaagaagcgaaatcgtgtttggctacatgttaggttatgggatcatttcaattattcaatcgactgtaattgtcctagcaactgtttggcttctaaaagtagaagttgtcggaaatgtctttaacgtcattatcattagtgtgctcctagccctcgtcgcccttgctttcggaattttaatgtcaacccttgctaattctgaatttcagatgatgcagtttattccgttagttgttgtgccccaagttttcttctccggtatcattccgctcgactctatggcccactgggttcaatatattggaaagattctccccttaacctatactggagacgctcttacccaaattgtcatgtacggaaagggcttaacgagtcttggcggcgatattttagccttgcttatcttcctcgtcgttctactatggctaaatattattggtcttaaacggtatcgcaaagtataattttattaagaggtgaagcagatgtctcaagttctagcaaattatgaagaacaactcgccaatgctaaaatgcccgcggggaaaaagaaagtccttactactgcattaaagctttttgcaaataatggcttccatgctaccactacggccaaaatcgctaaacaagctggtgttagtgaaggaacaatttataaatatttttcttcaaaggatgatttactagccaagttattgcaacctattttgatggaaattaagaacaacttttttagcaatcttgatgataaaatagacttatcttcattaataagttttattgttactgaccgaattcattttattgaggtaaattttgattttattcgattaatctttcaagaaattctaacaggtcaattaacagataaatcgtatcaagatttctttagtggcaatgatggcgttcttgtcaaactcaaaaaattacaggcaaaatttcctgaaattaatccaaaattaaatccacctcaactcgctcgtatttttattggccctattctcacttatgtcttgcagaataagttattaggcctgccagtaaataacgatgatcttgacattattcaaaaacaaattttagcgaatttaacgcttaaatattaactaaaaaagcatcagaagttgtgacttaacgacttctgatgccttttatgctacaaatcaattatttcattcagtttatacttaaccttcatgttttcccagccatacttaccaaagcgttctttcatctctttaggcgtaaacaacttattgctatcaaatgatgcttcaatcatttaacgatcatgtttaatattttgttgtaattgttgggaattctctttcatctaaaacacctcaatattttttctacttaacatccctgttatattttcacttcaattcttcatatagtggggtaagttgcctaataactgaactgatgtattcctccatattattaacttggtcttttccacgaaatgcaaatttgccaagcaaaaaactggtctttcgtgcatcagaattaaattgctgctgagcatcccgactattgatgtatttagtcagtgacatatgatcagaaaattccatctcatccttatcccaaaggtaccagcgtgtggcatcaatatcattagcccattccggtattttatccagtaattgattgtattcatccggcgtcccttgtcgttgctcactcttataatgttgaaacattaggtagacctgtaactgctttttatcaagcatcaccccaatacaggaattatagtctgctaacgatgctaaacgataagaggcccagtaatgatcacgcaggttccagccgttcgtccaactctcaacgtgaaccttcgcgaattcgcccgttggtagttgactagcgacagtttgatttaccttcttccacacttgccaaacggctttaaacttctcttttaggtctgcaacttcttctggtgaatgattttccttaatcttcttaaaggaaaattctggctggtcaaagattacaaacatactttcagttaatgctgtcattttagctcgcccctttttatccaagaatatcataactaaaaaagctaaactatgactcttaatttacacgaatcataatttagctttatagcttcattaaaacaaattcagcatcaccatataaaagccagttccgaccaagatcgatagtggcatatttcttttccaaaggtgaataaataatgttactaagccggcaacgatttctaataatgccttactaggctcagcaaaagaaatattccgataacaatagattactaatactcccatgattgctgccggaaggaatttccccagttcttccaggtaaggtgataattcttttgactgatcaaaaatcaggaatgggataaagcgggtcgccatcgtgacgactgctgcgattaaaattgaaataatttgttcagttaatgtcattttttctcctcgtgattaagtaatttaatgaaaacagtgcgacaagtgttactaatgtcactaatagaaaaacattcttgttgcaaaatagtaaacaaataattgcaaatgctaaaccaatcagagcatcacgctgagttcgggcatttttcaactgttctgtaaacaacacaataaaaagtgccgtcattacaaaatctaagcctgctaagtttaagttaatcatcccccaaggagtccacctaaacctgccccagctacccaactaaaatagttgaatgcggttatgtaaaaataaacatatgagcgatcaaggctatctggtacttttaacgttgcatttaaggaaaaagactcatcacacattccaaaaataagaatcggctttaactttcctgtattggaatatttttttaacatcgtaatgccataaaaaatatgtcgtgaattaacaagggcagttaaaatgagaacagtcaatggctgaaaactctggactaaaagattaccaattacaaattcgactgatccagcaaaaatggtcgcggccattaataacggatataaaaaattaaagcccagtttatgcatatatatcccatagccggcgcctaaaaatagaaagccaagcattaccggactagttttttgaaaagcgtaacgtacttcctttctcatggacgaattctccctccttaaaataacttgaacttattttaaacaggagtattttatccatacaaggaattaattgtatggattacaatattggagtgataaagtatgcctattaatgatttttcccaccatcagcttacctggtatcctgacaaaaataagctgacgcgaccaatttataaaagtttgctcaatcaactaaaaacagcaattgagcgtggaattcttacacccggaacgaaactgcccccgcaacgcgaactcgccgattatctcgacattaatttcaccaccgttactcgtacttacaaattaagtgcgcaacttggtttaacttatggaattcatggtaaaggaacctttgttaactcaaatggtatcgatccgttaactgccaattctcctttgacccgtaccattgatcttggctttgttgcttcctttgaacagacaaaccacctccttgacaatattcttagcaacaccgtcaagcaaggcgcctcgcaacttctaacctatgactcaccaaccgggcgtccgattgataaggaggctttccagcattatcttgactggcttggcgtgagattaactcctactcagcatatccttattacagcgggaggagaaaactcacttacattactgttaatgaccttattttcaggtggcgataagattgctgtcgacgaatttacctatgccaacctgattgcaaccgcgcaactaaataatctccatttagttgcgataaaaaatgatcaaggcgggatgaatattgaagcattaaaacacgcttgtcaaaacaacaatctagctggcctgtatctcatgccggaatatagtaacccgactggcgctgttctctcgatggctcgccggaaagaaatcgcaaccattgcgcaagaatacggactgaaaataattgaagatgactacctaagttttcttagtaaactcaatccagaacggccgcccaaaataatggaattactaccagaccagacttgttatgtttgcagtatgtcaaaagttcttgcatcaggactccgtgttggttatctagttttcccggcacagctagcccagcaaattaaaaatggtttcttcaacacaacagtcaaaacgtcaactctcaatacagcaattgcatccacggcaataaaagagcatatcgtccaacaaataattcaaaataaagtcaaccttgccaaacaagctaatatcctttttgaacaatatttcccgactgctcctacaaaccaattaaccgactatgccttttttcgtcgattaccgcttaaaagtattcaaaatacagccaagatcgaacaagcccttgctaatataaatatccgttgttttggctctgatcgttttcaaattaacgcttcttcaaatgaccattttctccgtgtttcattgtccgcaaataagtcacttgatgagttagaaacaggcctaaaaagattacgcgagtttttacagaaagctaatttaatttaaaaagtgatgttaagaatttttcctagcatcacctttacttttttgtttagcttattttctaaccgcctcgtaaatcatcccatttcactacataactctcttccctgccatccaagtttcattcacgtggatatttttaagttcactatgagcaactgtaaagatatcatcatttaagataacaaagtccgcggcctttcctacttcaagcgtaccattttcatcaaagccaccaatttttgcaccatcccgagtataaccaagaatagcttgtggaaccgtaattgcttcttctgcgttaacaacatcacaattagcggcctttcttgttacagccgcataaatactataaaacgggctatcaggttctgcccatggcgtacatggggcatccgaactcaagcctaacattgcttgagaattcaacattgttttaacgcggtaagctaatttaaactgggctggtgaaagataatgacgataggattcatcttccgcaaagaaaaagattggttgcgtgactaacgcatagttcattttactattggcaatctctgcaaacatttgatcagtcattaaggatgcatgttcaatacgaaccgatggcattgtggttagccatggcgctatctcttttgttacatcaatcactgtttgaattgctttatcgcccatcgcatgcacagctagttgaagcttattatcacgcgccatctttactgctcgctgaagtttttccactaaagtcaaactaactcccatttttcccgatggataaggatcagtattataggccgtttcgccagaaatactcccatccataaatactttaattccagcaacgcggagtttttcatccccgcttggttgcagtccaacctgcggatcaatttcatcaaagacatagtagatcgaggctttcggaccaaacccttgcttaactgcatcttggtatagttttaaagaagtatatggcttcatccggcccatcatttcaccaattgccacaattccctctttaagatagtgttcggaactattaaccatattagctacgtcgttctcatagctctgtgccgatttagcccgaataagaagttgtgaggcagctatttcgcgcataaaaccagttggtcgtccatcagcaaatcgttcaattttcccaccaaccggatcaggcgtattttcatcaattcctgaaagctctaaggctttagaattgccgacagaagagtgacagtcagaacgataaataaagattggttgcgttgttgaaacagcatctaaatcatcacggttaggactccgatgttctgctaattttgtctcatcaaccccccacccttcaatcggtactgtaccctgtcaagtttacatactaaataataaaaattaattggctttgccgtaacgaaattccgttgcagtaaggtcatttcttttagctgaaataaatgtatttgtaaagtattcaattccttcagccactagtgtttgaagttcatcaagtgtttgtgacttagatgaatgcgctagccaaattgctttaaagtcggcccaccagtgctcgataactgcgttatctgctggtgtgccaggagctgaatagctatgttgactattattgctagttaaatattgattgaacgccttagaagtataagcagctccgcgatcagtatgaataagtggggctaatacaccttcttgtttctgagctttcttgaatacttgaattgctccctcgctagtttctgttggggtaattagccagctaattggaaattgaccatataaatcaagaaccacatgtaaacgaactttataattatgaatattgtaggcgagttctgttgtatcagttacccaaacctgattagctgcttcctgtttaaattgacgattaagtatattttcagcttgataggtttgacgttccttgtcgcgttttcttttagcttgacgatagtcagctttaatcccatgttccttcataattctaataactcgttttttgttgaccaaatatccaagacctgcgcgcttaataagacgagtcattttcccatagccaatactttgcttattagttttctcaatttctttaatcacgcggtttgtaaaattaagttagaaaaataaaaagccatttgtggtagacttttgaatacccatacatcaaaagaaaggacaccacaaatgacctaccatcatcttaccatagacgaactaacgatgatcgctaattttcgtgaccaaggagtaaaagcctaccgggccgccaaacttttgcaccggagcttagaaaccgtctaccgagtttatcgctttctggccgccggccacacgctccaagaatattaccaacactatcgtgaaaacaaggctcattgcggtcggaaggctattcaattgcccactgatgaggtaacttatatcaaagccaaagtggctcaaggctagacgccagacacaattatgggacgcgctgaacggccactcagctgtagtatgcggacactttaccgccttttcgagcggggcaattttgatgtgcggaccttgccgatgaaaggcaagcgtcgccccaatggttacgtagaatggcggggggaaggccggtcaacttggccaaagcattcaccaacgggctatcgactttcccaactttaaccgtgaattcggccaccttgaagccgacaccgtccagggcaaaggacatcagggcgccgttatgactttggtagaacggacttccaaagtcgaagtgattcttaacgtccatagtaagacggccaccagtgtgatccagcacttacaggaatggttggcaaagtttccaccccacttcttcaagtcgattaccttcgacaatgggaaggagttcgctgactggcgagcaattgccaaccaatttgacctccagacctactttgccgaggtgggggcacctaaccaacgggggttaaacgagaacaacaacggccttctgcggcgcgatgggctccacaaaggccgcgatctccgccacctagctgatgaagaggttgctcaaataatgagttaccggaacaacattcctcgcaagtcattgggctatcaaacaccttacgaggtattcatgaagtatgtcactgatgagcaactactttttttctaacttaaattgacatttcgggataaaaaagaggttagagcttaaaattgctcaacctcgtaaagtttgttactcattaaaatgcctgctcatcatataaagggatcgcatttgaccatttatttcagaaatctgtggtaatttacctcattctttgtacccacaggaggtaaaaagatgatagcttgcttgattttcaatataaatatatgcaattacggttcttatatctagatgatcttcaatttgtttttgcgcatatattaataaatcacggccaagatgttgctgtcgataatcttcataaatataaatagctatctgtgccgaatgatcataggcgagatgcggataaaaatactcaagagcacaccaggcgattacttggtcatccattgttgcaacccagattggatgagtattgtcaaactgcataaatcattcacgtcgatcagcaacttcgatcggtgcactctcatcgttgacttgcagcggaattgcttgattaaatatatcgacaatcgctggtagatcatttattgttgctaacctaatttggtaatccatatcaaagcttccttacagtatttttacccactaattattacttatcatagaagtgctgccattctttattaacgttttcgcgagtcgtctttgtcccagtccatgatggaacttttacaaccccatcaatcttactcttaggtacaaatccccagtaacgaccatcgtttgaaacgctccggtgatccccaagaacaaagtattcacctttcggaacttttgtggcaccattattctttaaccaactgttctgaactgagatactacgcagtgtccagtttccagttccggttgttcgttgactcttgctaatgtagtcttgattaatctttttgccgttaacataaatgtttccattcttagagctaacagtatcaccagggagtccaattactcgcttaacataatcggttttaactgatacttgcggatcaatgccattagcatcaaatacaacgacacttccatgatggattttggcagttttcaaacaaaatactcgttcattattttgtaagtttggttgcatggatggtccatcaacccgaacaatttggaagaaaaactgcttaattactaatgcgattattaacccgattagaatgggaataatccaactcattgcttcacgaaatgctttcattataattcctcaatttctttatttaactgttattaatcatacaactagtaataaaacctgaaaagttatttataataaataatatattattttcacatttaataacatcaaaaagatattaaggttcaaagggagcgagacaaaaggcacttgtgacttcgttttcgagccccgcaagcaacaataggcctctaaggttcggttttgccggacgttagaggcctattgttgtactgcgtatttgctttttatgaaagtaacttaacttatgtcacagtcccttttaatttttatttcttttcgacaaagtacttttcgaagttcttttgatagttatgattaatccgttgttccattaaccaccgcatgaaattcatgtccttgtcataatggaaagttgttccatagcggccttctttaataagcttctcagcctgctttttaatttcattatttttagcatactgaaggaaggtcttttttgaaacccccagccataacttatagttgctttcatctttgtttccataaatcgtctcttgatcttttaagctatcaaaaacgtaatcttcaacggggaaagtagcaagttgatagccatttaatgaaacgaagaaactactacgaccttggcgaggattgaggtcaaataccttgaattggccatcacgacggtcatatttcaaatcaaagttaacaaatccagtaaattcaatactttcaaggaaattcttgatattgtcatagatttgttgatcatatgctggcataatcgcaacgtaattaccaacatttgctggattgcaatcttcaagtagcgggtgaccgagacacatcatctttaccttatgatctttatcaacgtaacaattgatggtccgcatattactatcatcaccagggataaattcttgtaaaacgaggtcgccattgtatggactatgctcatagataatctcaagaacttccgctaatctttctggtgtcttaataatataagccttttcatacccttcaaagtttcccttatgccattgcaccgcatcagcagccttcaaagcaattggaaattcaaatggtgatttatagttcttataatcaaggtctggttttaaaatatcggttttagggtaaggcaaaccatacttttcgcagacattgtagaacttctctttatccgttaatgttgctacttcatcataatcagcatacgggcagaacatgtgctgcgaaagttctttacgatttttcgcaactaattcagtatagtcatctccacaactaattaaaacggtcttcttgccttgcttagcaaactcatctgccgctttaattaataccttcgtaaacaattccggtgattgtaattgttcattataatgcaactcgacaatttttgaataacgggttggtgccaatggttggcgagcatataattgcgacttaatcccatatttttcatacatcgaccgcgccattccgtaagcattgaaatcactacctagaatcaatggaacaaaaggttgttcactcattagattcccactcctctttatctttctaaatcattaatataatcacgtgcaatcttcacatcagttaggtaagggacatcttcaccattaatcttctggtaaggatcttcacccttccctgcaaggactacaatatcatcatttccactaccgtcaattgcctttttgatcgccgtttcgcggtccatttcaaattgaatatgtttaaccttatcatgatcaatataagaatctatttcccgggcaatagtcatcggatcttcaaacccgggatcatcagtcgtcaaaattacctcatctggttgttcttcagttaaagcttttccaaaccctggacggcgcgaaatgcctttatcaccggttgctcctaagacaactgttactttaccagcattagtttgtcgttttaagaatgccaagagtcgcttcaagctagcgtaattatgggcataatcaacataaattgttccatgagtattactgttaatcatttccattcgaccacggatgtgaacatgattcaatgtttctacagcatcgttagcactcgccccagctaacccactggcaatgattgcagcgaccgcatttccttcattataatctccagggacactcgttttataacggccatctaagttcaactgctttgctttctcagttaaggcggtcaactcaaattcactttcatgaagatcttctaaatcatttcgatattcaaaatctatttgggcattgtcaggtaattcgatgtttgctcctcgccgtgcaaataagaaaatgtcttctggttgtgtggttgccttagcagtgtaataaacatcagtaaacttttcagtttctgcattgattaagcatttagcagaatttactaataattgttccttacagtgaagataatcagcaaaagttgggtgctcatttcgtccgatatgatctggcgagatgtttaagaaaattccaacatcatactttaaaccataaatccggtttttcttgtatgcttgcgatgatacttccattactaagtgcgtcattccattatcaacggcagcgcgcatatcatggaaaaggtctaaggattcaggagtagtcaaatcagatttaaattcatcttccggcttattgcctaaaatccgatcaagcgttgaaaaaagggcaatatgattagcagtactttgggctaaaatatggtcagcaaaataagccgttgttgttttgccttttgttcctgtaattgcaataatgaacaaatcattttgtggatagtcataaaatgctgcccccagtaaagacattgctttttgttcgtcgttcacgataatagctggcaatccttcgccttctggatattctttttcagccacatacgcaatcgcacctttttctttagcggatgctaggtatttaggcaaaaaatttcctttacaaaagaataaagttcctgattttaccttccgtgaatcataggacacgctagttgcggtaaaatcagtcaaattactaacatgatccaataaatggtgctcgcacaataatgctaaagcaggtgtaatatgcaattccatcttgcaaatgactctccttcaatctaatctgccctatattatttcattttttatcataaaaataaataagggttatcaattaacaaaaaaggagacttagaagagtcctacccttcgccagcctcctttaatatttttctatacttctgttgtagccgctttttgtgcgcggtcaattcccgattcatcaggtttgaagttatcaatgaaatataacttataccacgttaagaaggtgtagattgtccaaatcttacgacgaccatccaccttgccttcgaagttatcatcggcaagttttagaagcttttcttgatcaaagaactcttttacgaagtcttgttcaaataattcacgtacttcttggtaatacttcttttctcgaagccatgcacggactggagttgggaagcccatcttaggccgcgtagcccattcttccggtaaatgccgattagcagccatccggaatgcccactttgtatccttatagttaaagaggtacttagttggtgtcgtttcagctactttcattacctctttgtcaagaagtggtacccggatttcaacagagttagccatactcatcttatctgcctttaaacaaatatcgccaggcatgaaacggtgtaagtcaacatattgcttctttgcgacttcatcgatatctttatcttccatcttatcaaaaagtggattaagaatgtcggcaatacttggtccgcaatcaaattctggttgcaagtagtcagcggcttcttcaggactaaagatgtatgcttgaccaataaaagtatcccgtgctggcgctaagttgcgatacatatgctcttggccgtggaagtgtttcccatctaaccacttagcaaacttataccgacgttcacgaggcatcttctttaattgatcagttacccaacggataaatttaactttcgtattaaaaccataatcaatgtatcccgcaaacaattcatcggcaccttcacctgaaagaagggccttgtagccgttatcctttgctaacttgttcaagaagtataaaggaacaacagatgggttagaatcgggttcatctaggtagtattgaatcattgggaatgcgtggaaagcttcttcgttagtcaacttttcatcagtattcttcaagcccatcttagctgctaattcacgtgcttgtttggtctcatcgtaagtactatcaaatccgattgagaacgtattatctggacgcatcaaagccgttactaaacttgaatcaacccctgcggaaaggaatgagccaaccttaattcctttatctgcaaaggtatgtgccttaacagaattcttaacaacttcgtcaatcttgttaacagcttcatcaaacgtctcgtcttctggctcaaagttttcgtcccagtattgggtcatttcaaactgaccgtctttataagtgaagtaatgcccctctggaagacggtaaacacccttaaagaaagtttcttgagtaactgggtattggaatgtcatgtatggtttaagcgcttctttattaagttccttcttaaagttaggatgatcaagaaatgccttaatttcagacccaacaaagaaagtaccgttcattttagcgtaatacaatggtttaattccaaaatggtcacgggcaccgaacatttctttagtcttaaaatcccagataacaaagccaaacattccgcgcagcttgttaacaacatccttgccccattcttcatatccgtgcaagattacttcagtatcggcatgtgtcttaaatgtgtgacccttactgattaattcttcacgtaattcttcaaaattgtaaatttcaccgttgaattcaatggcttttgagctatcttcattaaagattggttgattaccagacttaacatcaataaaactcaagcgccggaagccaagtgctacatcatcatccacatattgaccttccgcatcaggtccccggtgaataatccggtccttcattttttggattaattggtctttaatttgtggtttttcattatcaacaaatgcaacaatcccacacattataaatttcctcttctttctcttaaattcacggatcacaaaatagttatttaaaattcgttattaaaacttgaacctagattataccatataatgccaaacttaagtatattatccatttgctttaagaaaatcataataaaatctggagagcggagtcattactctgtttctccagattttatttcccaggaaattttatttacgatccttcttggaaaacttcccctgacggacgtaaacacttaagattgcaatatcagcggggttaactccactaattcgtgaagcttgggctaaagtttctggacgaatcttttcaagcttttgacgtccttcagttgctagaccatcaatatcaccataatcgatatcatctggaatccgtttagcttccatccgtttcatccgttcaaccttaacttcctctttcttgatgtaaccagcatatttcaattgaatttcaacctgctcaatcacatgacgatcaagttcctgttctggtgctggaatgaattcggccaacgtttgataatcgaagtatggtcgcttcaagaggtcagctgccgcaattccatcttttaagcgattatccccgtgtgcttcaataaattcgttaaccttatcatcgcttggcttgagcttaatttcttctaatcgtttgatttcagctgcgacttggcgcttcttctcttccattttagcaagccgctcatcactaactaggccaacattatgacccatttccattaaccggaaatcagcattatcatgacgtaaaattagccgatattctgcccgacttgtaagtaaacggtaaggttctttcgttccctttgttactaggtcgtcgatcatcacaccaatatatgcatccgaacgcttaaggacaaatggttccttgccttgtgcccgtaatcctgcattaatccctgcaattaatccttgccccgctgcttcttcataacctgaagaaccgtttgtttggcctgcagtatagagattcttaatgatcttggtttccaaggttgggtgaagttggtacggcgcaactacatcgtattcaattgcatatccaggacgcatcatttctgcattttctaaccccttaattgagtgtacaatcttttgttggatttcttctggcattgatgtcgaaattccgtcaaggtaatattcatccgtatcccggccttctggttcaaggaaaacttggtgccgcggtttatcagcaaaacgaacaatcttatcttcaattgaaggacagtagcgtggcccaacacccttgataacaccagagaacattggagcccggctaagattttcccgaataatggcatgggtcccttcatttgtataagttaaccaacaagataattgttcgctaattggaatataggcactatcaggagtatcaaaactaaagtgatgtggttcctcatccccgggttgttcttccgttacactatagtcgattgtctttccattaacccgtggtggcgttcccgtcttaaaacgctcaagatcaaagccaagttcttcaaggttttccgaaagttttaccgctgacttagagttatttggaccagattcatactgtaattcaccaataatgatctttccgcgcgctgcagttccaacagttagtacaaccgtcttagcgtggtaacgagctcctgtattagtaataacacctttgcagacaccatcttcaacaattaactggtcaacagttgcttgacggagagtaaggttaggttcttcctcaattgtctgcttcattgcacggtgataagcatgtttatctgcttgagctcgtaatgcacggacagcgggacccttaccggtatttaacatccgcatttgaacataggtcttatcaatgttatggcccatttcaccaccaagagcatcaatttcgcggaccacgattccttttgccggaccaccaacagaggggttacatggcataaaagcaaccatttcaagattaattgttaccaacaaggtcttatttcccatccgggctgcggcaagggcggcctcgcttccggcatgacccgccccgacaataattacatcgtatgatcccgcttcgtattgaacggcatcagatgtttgcaatgcttctgaactcttcattcttctattccctactttcctaaacagaattgactaaataactggtcaagcaactcatcttggtaactatccccagtaatttcacctaataattcccaacaccgggtcatatcaatttgaaccaggtctaccggcattccatcattaattccttttaagacatcgcttaaagcatcattagcttggtgaagtaagccaatgtgccgagcatttgtaaccattacattattctggttgctttcaatccccttgttgaagaacatgtgaccaatctgttcaccaagttgatccattccttcatgattaacgattgaagtttcaataacagcactcttaccagctagtgatttcaattcctctaaatcaaccttgcgtggaagatccgtcttatttaagatgatgatccgctgcttatccttggttgcttcaagtaattggcgatcctcgtcagttaattcatttgaactatcaatcaagagaagtactaagtcagcggcgcccaaagctttgcgactccgctctaccccgatcttttcaacttggtcatttgtatcgcggattcctgctgtatcaattaacttcaatggcaccccgttgacattgacatattcttcaattacgtcccgggttgtcccagcaacgtttgtaacgatcgccttgtcttcgtgaagcaaggaattcaataagcttgatttaccaacatttggctgcccgatgatagccgttgctaaaccatctcgcaaaatctttccttgcttagctgttttaagaaggccttggattcgttgttgaatgtcctctgctttttcttttaagagtttcgtcgtcatttcttcaacagcatcatattctggataatcaatattaacctctacctgtgccaatacatccaaaatgtcttgtcgcaaattacgaattaaccgcgacaaatcaccatcaagttggtttaatgcaaccttcatcgatttatctgtctttgcacgaattagatccattactgcttctgattgggataaatcgagacgaccatttaagaaggctcgtttagtaaattcacctggttctgccatccgggcgccaaagctcagtaccaattgcagaatacggttagttgctaacaatcccccgtgacagttaatttcaatcacgtcttcacgcgtataagtgtgaggcgcgcgcattactgaaaccatcacttcatcaacttcctggtccgtatcagggtcaacaatatgaccatagttaatggtatgagttgctactttggcgagatcttttcctttgtagatccgttgagcaactttcaccgcatcatccccactaattcggataatggaaattccaccttcaccaaccggtgtcgaaattgctgcaatcgtatcattctcgctatttgccatcgctactttactcctttctaacaaaaaaagtgctagtccatgcatagtaataaaaatatcactaacatggtcaaagcactttcactactttaacgaatattaaatttataaccgctcatattctaagatcattaccagaaattgtcaacaaataagttagtccttaggcgcaatcacgatactccggtaaggttcccgaccgtgggagtatgtttttacgtggtgattattctcaagttcatggtgaatttgtttccgttcgcgggcgggcatcgggtccataaaaactgctttcccacttgcaactacttccatcgccgccttttgcgctaggttgtgaactgcttcttgacgccgttcacgataattggaagtatcaagttcaacatttacttttgccgctccatgataatccatgaatatattactaagctgttccatcgagttgatccggcgaccgtgcttaccgatcacccgtccattttcctcagtttggagattaattttgagatcatgagcttctaaattaataatccgcggttcaacagcaatacctaattccttaaatactgtcgttagatattcaaccaattctttactagttgcttgaacctttttaagattggcctgttgccgccgcttgatttcagtagggtcgagctcatcttcagctaaatttaagcttgcaggcttttgttctggctcttttgccagttgctcatctttttcttccagtgagggcatcgcaatttctttatcttttattactgcatccacttgcgcttggcgtcgtccaattcctagaaaaccgtgccgcggctgttgaagaaccctaaattcaattgtctgattaacagttggcttcaattgtgtacgggccttttcttttgcttcttcaattgttgttccagtaaaaactgccatttttatcccccgtgaatttaattaatttccactctttaaatttattactaaataaaaaggctcgcaacaactttacttgtcacagccttaataacttatttccgccgactttggtaagcgcgacgttttgctttttcaatcttgcgacgttttgctttttcagcccgttgcttttcttcacgttcacgacgaatcttaaatggattctggatgataagcgtttggacaacttggaaggcatttgttactacccagtataaggtaatagctgaagagaatcccaatgccatgaagaataccataatcggcataaaccacgtcattgtagttgtcattgagtttttttcgggcattgaagccatggataaccatgaactaataaatgtaaataatgccgctagaataggcataatgtagtatgggtccgggtgacctaactgaagccacaagaaagttccattccgtaaggctgaggtccgccagattgcttgataaagagcccacataactggtagctgaaccagtaacggaagcatcgaagcccatggattaactcctgcttctttatagagcttctgcgtctccatttgcatcttttgcattgactcgcgatcacgtgatgagtattttttctgaattgcctttaattgaggagcaagttcttgcgtcttcatcatggtctttgtttggtagaacatcaatggcagtaagatgatccggatgatgatcgtaaagataatgatccccattccatatccgccaaagtgctttgataaccaaatgataaattgtgaacagttatagataatgtagtggtcccagataccagtactatgactagtaattggcttattggagcaagcagctaaaaatagggtcaagctcatgattgctcccaagcttaggaatttttttgttttcttattcaaatcctaatcctcacttttttcatctaacaaatgtgctcgctttaaaacgtgcactaggtttttctttgtttctgccattgataaaccatctgccgctgaccgagcaataaccaagaaatcaacatcagaccgtaattgcggtttcacctctaataatgtttgacgaatacgccgcttaacccaattacgatgcacagcatttccaatcttttttccaacagaaataccgacacgaaaatgtttttgtcctggcttttccatttgatatacgacaaatttgtggttggccacggaattatgggtttcaaaaacccgttgaaactcactttccttttttacgcgatatgattttctcatttgtataatccccagccttaatttaagtagatataaaaatagggccgggcatacgacaactttaacgattcaaattgctcgtcaagctgactgccctgccccacacaataaaaaaagccactataaaagtggccgtggttatgcagataatacttttctgcccttttgacgccgacgtgctaataccttacggccgttactggtgctcatgcgcttacggaagccatggacacgtgcacggtgacgcttctttggttgaaacgtgcgcttcatacaattgcacctcctattaaattcgagtggtttggtttctagagtctaaaagacgatctcttcaaacatactttggtagtataacacacttaccgaaattaataaacggcgaatttttatttaaatttttttgattattaacaaaattagcaaaataatccacagcgttgtgtaaattcataatttgtggacaagttatcaacaatgtttttcagagattatccccagattcacacatgttgataaagttatccacaagtggtctttcaggtgttgataactctctattttactgctatatcaatagtatatatcaacacaattctgtggataagtgataatggaatctccttttccccatttttcacagcaatattattaatttacacacagtgttgtgtaaacttttttattattatccacttggttgtggaaaactttcccatgtaatgataaaataccgtttgtaatttaatactttaggaggaaattattttgactgagctcgattctctgtgggaagcgatccaaaattcatttcgtcaggataccactccggttacctttgacactttgattgctccggcaaaagcaatttctctctctcaaaatcaactggaaatcgaggtgcccactccggtgcatcgcgatttttggcgcaaaaatttaaatacacagcttaaagaattcgctcaacatgaattgggacgtaatattgagccgcattatattttagagggagaatttacctatacaaataaaaaaacagaagatgatccaactccttcttttgagatggacactcctcttaatcctcattacaactttggaacattcgttgttggagaaggaaataaaatggcacacgctgcagcatttgccgttgccgaaagtccgggcagcctttacaacccgctctttatttatggaggggttggtttaggaaaaacccacttaatggaagcgatcggtaaccatatgcttcaagttaatccaaattcgcgtgtcaaatatgtgacgagtgaggattttaccaacgattatattaatgctattcgtaataatacgactgaacaattaagagaagaatatcgtaaccttgatctcctattaattgatgatattcaatttttagccaacaaagagggaacacagctagaatttttcaatacttttaatgcccttcatgatcgcaaaaaacaaattgttatgacatctgatcggattccaaatgagattcccgaactgcaagaccggcttgtatcacgtttcagatggggacttactgtcgaaatcactcctcctgacttagagacgagaattgccatcttgcggagtaaagttgaggaagatcatattgatattggaaacgacacccttaattatatcgctggccaaatcgatacaaatattcgtgaactagaaggagccttaacaaaggttcaagcatttgctaatttaagcggtgagcgaatcacgccaagcttagcatctcaagcattaaagggacttcaccgcgtagccaaaaacgaaatatcaatcgctacaattcaaaaacaagtcgctgatttttataatataactcaaggagatatccttggtaaaaagcgagttaaacaaattgttatgcctcgccaaatcgctatgtatctttctcgagaactcaccgattcctcgttgccaaaaatcggcaacgaattcggcggcaaagaccataccaccgttttacatgctatcgacaaaatcgaggcagaactaaaaaaggatactgacttacaaaacgatattacaaaattaaaagctaaactacgatcataagctgtggataagtataataattatcctcaaacttatccacaagttatcaacaggtggataactcgcaataaagatgtttaaatagttttccacagtattaacaggccctactactacgactatattttaaactattaaatatatttatatacttatacaaaaggactgaaacatatgaattttacaattaaccgatctgcattcattagtcaactaaataatgtcttacgtgccatttcatctaaaaccacaattccaattcttactggattaaagatggtcgtaaacgaagacaacattgtgttaactggtagcaattctgacatcactattgaaagtgttattaatgctaatgatgctgagaacgatttaacaattgaagccactggcgctattgtattaccagcccgcttcttcagtgatattgttaaaaagctgccagacaaaaaagtaactattgaagttacaagtggttttcaagcagatattacttccggttcagctaagtttcaaattaatggccaagatgctgaaaactttcctcatttaccagaaattgaaactaacaaatcagtaacccttcctaacgacatccttaaagaagtaattcgtcaaactgttattgcggtatctaagcaagaaagtcgcccaatccttgccggggtgcatatgacgttaaaagatggcgtcctaacagctgttgcaacagatagtcatcgacttgcacaacggaaagtggtcctcgaaaacatcgataacagcatagattttgatgtgattattcctggaaagagcatggaagaactttctggaatgattagcgatgtccatgaagatgtacaaatgcaagtaaccgaaaatcaagtattgtttatttttggtaatactcatttctattcgcgattactagaagggaactatcctgaaacaagccagttaattccacaaactgctgatacaacagttgaactagaagctgggacatttctatcatcaattgagcgtgcttcgcttttatctcatgaaagccgtaatgatgtggttaagttaagtctaaagccatcagaaagtgttgtccgaattagtggtgattctccagatatcggtaccgttgaagaaaaggtagtcacgtctgctcttgatggtaatgatcttgaaatctcgttcaatcctaactacatgaaagatgctttgcgttcttttggtcaggcaacgatcaagatttcatttacttcaccattgcgaccatttaccttggtgccaacagaagatcaagaaaactttgtccacttaattacaccagtacggacattctaagaaaggtcttatataagttttataaaaaagagactacagaacgttttgttttgtaacctcttttttatttgccatagattaaattttattagtattgctagtttatattcagatttttgaccatagagcaaatttaaccgaattttgataaaaaaggctaaaataagttaatgcgctcagaaaggctaataacgcaaaattaaatcaaataatgtggtataataaaattacaaaagtaggtgaaaaaaatggaagaaaagtcagtgttgattgatagtccatttattacactcggccagttactcaaagaagaggggattattcctactggcggagcagctaaatggtttctaaaagaaaatactgtattagtaaatgatgagccagatgatcggcgaggacgcaaattgtatcccgaagataagattcaaattcctgaccaccaattacttgttattaagggtaagtagggataagcatgattctgacggaattgcatttacatcactttcgaaattatcaggatctaaccgttcacttcaaccctggagtgaacgttttaattggtcataatgcacagggtaaaacgaatatgctagaggcaatctatgttctttccctgaccaagagtcatcgaacaagtaatgaccatgaacttattaattggcaagaaaaatcagctctaataagtggcacagtagagaaaagtattggcaagattccacttgaattacaattctcaagtaaaggaaaaaaggcaaaggtaaatcatttagaacaagcgcgattatcacagtatgttggtcaactaaatgcaatattatttgctcctgaggacttgtcgttggtaaaagggtccccagctttacggcgccactttatggatcgagaatttagccagatgagtagcaagtacctctacaatgcaggccaataccgcacactcttacgacaaaaaaacaaatatttaaagcaactaaaatataagcaacaaactgatcgcgtccttttaggagtcctatctgatcagcttgctgcttttggtgcggaagtaattattgcccgtcaacattttttaaagcaccttgaaggatgggcagctgatttacatcaagagatttcactgaataaggaatcattacagcttgaatacgttaatcaattaaaggttaatgatgagactactgctgaagaggcttatcaggccctttttaaattatatcaagactacgaacagcgtgaaattgagcaggggacaacaatttacggcccccatcgtgatgatatccgctttctggtaaatgataaaaatgtacaggcttttggatcgcaaggacaacagcgaacgacagcactatcagtaaagctagcagagattgatttgatgaaagagcaaacaggcgagtatccattattattattggacgatgtgttatcggaactagatacaattcgacaaacacacctgttaacagccattcagaataaagttcaaacatttttgacgacaactagtttgagtgatgttgctcgccagctaattaatgaacccacgatttttgaaattgagcacggcactttgaataaggaggaagtaaagtgagcaacgaacaacaaaaagaaaccaagatggaattggctagcgaatacgatgctagtcaaattcaggttttaaagggattggatgcagttcgaaagcgtcccggaatgtacattggttccacttcagcccagggacttcatcaccttgtttgggaaattgtcgataacggaattgatgaagccttagcaggattctgtgatgaaattaatgttgtagttaatccagataacagtattactgttaaggataatggtcgtggaattccaattgatacgcaaaaagaaactggaaagtcagccttagaaacggtctttactgttctgcacgccggaggaaaatttggcggcggcggatataaggtttctggaggtcttcacggggtaggggcttctgttgtaaatgccttatctactgaattagatgttaaagttgctcgtcaaggtaaacgttactacatggattttgatcatggtcatgttaagtctgcaatgaaggtaattgaagaaggacttccagaaactgagcatggtacaaccgttcactttaagccggatccagaaattttccgtgaaacaacgacttacaatattaaaactttaactgatcgtttaagagagttagctttcttaaataagggacttaaaatcacgatcgaagacttacgagaaacagatcatgaacggaaagaattccattatgaaggtggtattcgtcattatgttgaataccttaatgaagatcaaaatgttttatttgatccaccaatttacgtggaaggtaaagaaaatgatattactgttgaagtttccttacaatatacagattcatatcgtagcaacttactaacttttactaacaatattcatacttatgaaggtggaactcatgagaccggatttaagatggctcttacacgcgttattaatgactacggccacaaagcaggtgttttaaagtcgaatgagaccttatcaggagatgacgtacgggaaggtttaactgctgttgtctccattaagcaccctgatccgcaattcgagggacagactaagactaagttaggaaattcagatgcacgaacagcgactgaccatgtctttgcggcaacatttaaccgattcttattagaacacccagacgaagcgcggcaaattattgaaaaaggtcaactcgcttccaaagcaagagtggctgctaaacgggcacgggaagttactcgtaaaaagagtggtcttgaaattagcaatttgccaggtaagttagctgataacaccagtaaggatcctgaaatttcagaattatttattgtcgaaggggattctgccggtggatcagcaaagcagggacgttctcgactcacccaggcaatccttccaattcgaggaaagatcttgaatgttgaaaaagcaacccttgatcgagttctagctaatgacgaaattcgttctctatttaccgctcttggaacaggttttggggatgactttgatattacaaaggctaattaccataaattgattatcatgactgatgcggatgtcgatggtgcccacattcggacattactgttaaccttgttctaccgctttatgaaaccaatgattacgcatgggtatgtttatattgcccaaccgccgctatatcaagttcggcaaggtaaatttgtaaaatacattgactctgatgaagaactagagcaggttgtaagctcactgcagccaagtcctaagccagttattcagcgttacaaagggctaggtgaaatggatgctgagcaattatgggaaacaacaatggacccagaaaatcggcacctattacgagtaaaactagacgacgcagaacaggctgataagattttcccaatgctaatgggaaccaaggtcggaccacggcgcgactttattgagcaaaatgctaagttcgttgaaaaccttgacctgtaattaactgttgtttactgctaacgcaaaaaaggaggaacgacattggctgaacaagatatgcctaatcggatcacggatgtaaatcttacgagtcagatgaaaaactcattcttggattatgcaatgagtgttattgtttcacgtgcgcttccagacgtccgtgatggattaaaaccggtacaacgccggattctatatggaatgaatgaattaggggttactcccgataagccttacaagaagtcagcccggattgtcggggatgtaatgggtaagttccacccacatggtgactcttcaatttatgaaggacttgtgcggatggctcaagactttagttatcgttacatgcttgttgatggtcacggtaacttcgggtcagttgatggtgatggagcggccgccatgcgttatactgaagcaaagatgagcaaaattgcagttgaaatgcttcgggatatcaataaaaataccgttgatttccatgataactatgatggtactgaaaaagaaccggatgtattaccagctcgttttcctaatttattagttaacggtgcctcagggattgccgtggggatggctactaatattccaacccataatttaggtgaggtgattaatggcctgcatatgttaatgaataaccctgatattacaacggaaggactaatgaaggctattcctggtcccgactttccaactggtggagtagtaatgggtaagtccggtattcgtaaagcttatgaaaccggtcggggaactattattgttcgagcaaaagttgatattgaagaacagaagaatggtaagcaacggatcattgttcacgaaattccatacatggttaataaggcaaagttaattgaacgaattgctgaattagctcggaataaagatattgatggaattactgatgttaacgatgaaactgaccgtgacggaatgcgaatcgtaattgatgttcgtcgtgatgccagtgctgaagttatcttgaataatctttacaagatgaccttgatgcaaacaacttttaacttcaatatgctagcaattgttaatggggctccaaagattttaagcttgaaacaaatcttgcaatattatctggaacaccaggaatcagttgtacggcggcgaacggaatttgaattaaagaaagcccagaatcgtgcgcacattgttgccggattgcggattgctttagaccatattgatgagataattaatattattcgtaattcacaaacaagtgaagtagcgaaaaatgagttgatgaataattatggtttatcagatcgacaggctcaagctatcctcgatatgcggttagttcggttgaccggtctagaacgggaaaagatagaggatgaataccaaaaattaatggcagcaattgctgattacaaggatattcttgctcatcgtgaacggatcaatcaaatcatttatgacgaattgatggaaattcaaaaacgttttggagatgaacggcggactgaacttcaagttggtgatattaccaatattgaagatgaagacttaattgaagaagaagatattatcgttgccttgacccacaatggatacattaaacgtcttccagttgatgaatttaagtctcagcatcgtgggggtcgtggtgttaagggaatgggagttcataaagatgattttattgaacaactaatttctagctcaactcatgatatgttgctcttctttactaattcaggaaaagtatactcaatgaaagggtatgaagttcctgaatatggtcgggctgcgcagggaattccaattattaacctgcttggaattaataataaagagaagattagcgctgttatcaatgtttcacatgaaactaacgatgatgataaatacctcttctttactactaagctaggaacagttaaacggacagcagtaacagagtttaagaatattcgaagtaatggattaaaggcgcttaatctccatgaaaacgatgaattgattgatgtagaagttattagtgaagatcagccaatgattattggtactcataatggatatgctcttagctttaaatcatcagttgttcggtcaatgggacgaagcgcggctggagttcgtgggattcgtttacgagatgaagactacgtaattggcgctgcccctcttaattctgatagcaaggtacttgtaattagtgaaaatggttttggaaagcaaactcctgcttctgaatacccaatcaaaggccggggcggattaggagttaagacagttaatgttactgcaaagaatggcccgctggttggtttaacgactgtcaatggtgatgaagatatcatgttagtgactgaccagggagtaattattcgttttggcattgaaagtgtatcgcaaactggacgatctgcggttggtgttcacttaattaagatggataatggtgcccgtgttgctacgattgcaaaggtggataaagaagtcgatgaggagactgaagaagtaactaataattcctcacaagaagaaaatcaaccaacagaaaattaaaaaaataaagtgagaaagtagatattttacgtatatatagttatagtgaccgcaacatttaggatttcttgttagatgttccttgttttaaatagaattttatgctatattttatgtctgtgagtatacgtaatgacgtctactttccttgttcttctcaaatagcgagaagagccagagtccataaggaggtgtaacattcatggaaacacgcaaatatgaaattacttacatcattcgtcctgatatcgaagaatctgcaaagagcgaattggtagaccgattcgacaagatcttggcggacaatggtgcaactatcgctgactcaaaggattggtcaactcgtcgttttgcttacccaatcgctaagtacactgaaggtacttaccacgtggtaaacttaactactgattcagaccaagctttaaacgaatttgatcgtttagctaagttcagtgatgatatcctacgtcacatgattgttaagcttgatgcttaattaatttgtcaataaagtaaagagaggagaaagatctatgcttaatcgtgcagtcttaactgggcgtttaacaagagatcccgagttgcggtacacaaccagcgggacggctgttgtttcatttacgttagctgttgatcggcaattccgaaaccaaaatggtgatcgtgatgctgactttatcaattgcgttatttggcgtaaatccgctgaaaactttagtaactttacgcataagggttcacttgttggaattgaagggcgtattcaaacccggaattatgaaaaccaacagggtaaccgtgtatatgttaccgaagttgttgtagataactttgcattgttagaacctcgtcaaaatggtggtgtgaaccaatcaggcgttcaacagccatttaacaataaccaacaatcgtttggtgctcaggctccacaatatggcagtcaatcacaacctggaaataatgctcctcaaagtaatccgtcaccaagtatggacaatggtttcgatcccaatcaaaatgctggcaaccagttccctggaagtagtgatgatggtggtcaatccattgatttagctgatgacgaattaccattctaaataaatttttactcagaataggagggtaatttcatggcacaacaacgtcggggcggacgtcgtcgtcgtaaggtcgacttcatcgccgcaaaccacatcgaatacatcgattacaaagacactgatttattacgtcggttcatttctgaacgtggtaagatcttaccacgtcgggttactggtaccagtgctaaaaaccaacgtaagttaactatcgctatcaagcgtgcacggatcatgggtcttttgccattcgttgcagaagactagtttccactagtaatattaattaaagagacctttttataggtctctttaatttttaaatgtgcgcccggcatgggtattagctaggcggtgagagtccgctatgggccgtagtagtcggaaccatgagctgaggacaagggtgtccactgcgaggtggaatctgaaggaagtctaaggcaaagtactgcaccgatgaacaagaagtagctataaggctggaactaactggataagactgcatgacaagttaaagtccaacactactcgaagttactttcagtaaagctaccggtgacatggtacgaaagttaatatccttacccggggagatctggcctacacgtttccgacaagaggaataagtttaatttccacagaaacaagcggtgcagtgatgtagcgttgagtaagccagaagtcagccgaggtcatagtagtctgagtaatcagatgaaggactgaacgacaataacttgtaacttatatcggaggtgtaatcaggtgcgacaatcgcagaaaacagaacaacaagctgaccgcttgtcgaggataggtttggaaaaccgaaagtacacaagggcgcgtagtaccgattatggtgaaggtaaaggtatgagtgtcactatccaagacttagtcttggaccgcaataaccttaatcaggcttatttgcgagttaagagaaataaaggggcagcaggcattgacgatatgacagtcaatgaccttctgccatatctcagagaaaataagacggaattgatcgctagtttgcgtgagggcaagtataaaccagcaccagtcaaacgggtagaaattccgaagcctaatggtggagtaagaaaactcggaataccaacagtggtggaccgaatggttcaacaagctgtggcccaaattcttacacctatctttgagcgtgttttctctgataatagttttggcttccgccctcaccgtggggctcacgacgctattgcaaaagtagtagatctttataatcaaggttatcgaagagttgtcgacttagacctaaaagcctattttgataatgttaatcatgacttgatgattaagtatcttcaacaatatattgatgacccatggacactaaggctcattcgtaagtttctaactagcggagtcttagaccatgggcttttcgctaagagtgaaaaaggaaccccacaaggagggccattgtcaccaatactggcgaatatctatctaaatgagttggataaagagttgactagacgtggtcaccactttgtgcgctatgcggatgattgtaacatttatgttaaaagtcaacgagccggagaacgagtaatgcgaagcattacccagtttcttgaaaagcgattgaaagttaaagtgaacccagataaaaccaaagtcggtagcccgctacggttaaagtttcttggcttttcgttgggtgtagaccacaatggagcctacgcccgtccagcaaaacaatcgcaacaacgagtaaagaaagcattgaggttattaactaaacgtaatcgtggaatatccctgacaagaatgtttgaagaaattcatcgaaaaatgcgtggatggcttcagtactactcaattgggaaactaactgactttattcaacgccttgacaagtggttgagggcccgaataagacagtatatctggaagcaatggaagaagcttaaaactaaggtaactaacttacagaagctggggctgtcccagcgtgatgcatatgtcttcgctagtacccgcaagggctactggcgaactgcacacagtaagaccttgagctattctctaactaatagaaaactggaacaactcggacttatgaatatgtccaagacgctccagtcaattcaatgtgattaagttgtcgaaccgccgtatacggaaccgtacgtacggtggtgtgagaggtcgataattgaactaatcaattatctcctactcgattatagaaaaggagtgactctaagatgaaactaaataaatatattgatcatactttactaagtcccgaagcaacagaagcacaagtagaaaaagttattaagcaagcaattgataatcattttcatactgttatgattaatccatactgggttgctaaaactcataaagcattagaagaaactgatgtagtaacagcaactgttattggttttcctcttggagccactacaactgcaacaaaagtttttgaaactgagtaagcgattaaagatggtgttgatgaagtcgatatggttatgaatatcggcgaaatgaaaggcaaaaattatgctaaagtagctgatgatattaagacagttgttaaagttgctcataatgccaataaggttgcaaaggtaattattgaaacagctttgctaactgatgatgaaatcactaaggcatctaagattgttgctgatgcaggtgctgactttgtaaaaacatcaacaggtttctcaacccgtggagcagcagttcatgatgctgaattaatgtcagcagctactaaagaaactcccactgaagtaaaggcttctggtggtattcatacaaccgaagaagcagaagcaatgattaatgctggagctacaaagttgggcgttagccatagtatgcaagttattggtaaagaatagaataatgtcgaaaatagttcagcggttggtgaaaatcagcctctgaactattttaatgttattatagattaataataaaacataaatgagggattgcgagtggatagtaagcaacaaattaaacaggccgtccaggttagtaaactttactatttagatggcgttacccaagcagaaatcggaaaaaaactaaatttatcgcgaccaacaatttctcgattacttcaatttgcacgcgagaaaaatattgttaaaatttcaataaatgatccccttagcaatattgaagatctgcagcaccaattaaaagaaaagtatcaactaaaggatgtcattattagtactccagaaagcaatgaaacggctgaaattttatcatctttaggtaaggccacggctcgttaccttgataaaaaagttaaggataatgatgttattggtgttagttggggaaggacactggtcagcgtagcacgtcaattgataccaaatgaccgtaaaaatgttcaggtggtctatttgaaaggaacagtggcgaactctactcataataattatgttgtagaggttactaaatgttttaataaatgctaccatacccaggcgcagattcttccgcttcctttaatttttgaaaataagcaaattaaagagatggtgataaaagataaatttattaacgagattttagatactggtaagcggacaagcgtggcactttttacggtagaaacgacggaacaagatgcaacgctatttgaactaggttattttaatgatcagcaaattaaaaccttgcaagagaaagcagccggggaccttgtttctcgctttattgatgaacgcgggaaaatcgttgatgaccagttaaatgatcgcacagttgctattgctttagatgatctaaaacaagctcgggaatcagttcttatcgctggtggaatgaataagttaaaagcaatcaaagcggccttagctggaaaatatgcaaatgtattagtaaccgattcacttgtggctcaacacctattatagttacccattagatgatataatctattgactaagtatttgatgtgatatgatagatttatccaattaataatttaaagctatttttaggaggactagcatgcgaaaaattttcagtcgtgagaactgggagttttattttgaacacccagccgtccgctggaatgtctgctatatagtgcttttaacaatcattgggcttattttagggtttatggataactggattattggactaattgttttagtaatcgcagttattggtggagctattagtattcggcggttaagaaaattattagtcgatgctcatgaatatttaaatgaattaacgtataaagtccaacgtgggcaacaagaagcattactggaaatgcccatgggaatgattatgttaaataagcgtcatgaggttgaatggattaatccatatatggcgcggtattttaatcttgaaattgttgtagggaagccgattgcagatgttgatgtaaaattagcggaattaataaaagatcatgcagatgataagcaaacacaagtagtgacatggcgtgaccatcaatttgaatttttggttcagcatcacggacaggtagtttatttattagatattacaaaatatgaacagattagtgcacaatataaggatgaacaaatcttcattggtaatatttacctagataactatgatgagctgattcaaggaatgagtgattctgatgtctctaatcttcataattacgtaacttcacaaataagcgattgggcagttgctaatcacttattgatgaagatcattgatgatgataactacttgattattggacatcaagcttcattaaaagaacttgaaaaacaaaaattcaagattcttgatgttatccgtgaaaatacatccaagcaaaattcgccagttactcttagcgtaggaattgcttatggcgaaaatgatctgataaaacttgctgatacagcacaaaataaccttgacctcgcgttaggtcgtggtggagaccaagttgttgttcgggctcaagatcaggaggcacgtttctatggtggaaagaccaacccgatggagaaacgaacccgggtacgagcacggatgattagtcaagcattacaagaattaatggctcaatcagaccaattatttgtgatgggccacaccaatccagatatggattcaatcggtgcctgtttggggattcgacggattgcggaaatgaacggtaaagaatgttggattgtgattgatgatgaacatccacactctgatattcaacgtttgatgcatgagattgataattaccagacgattaaggaccatattatttcaccagtcgaagcgttagaaaaagcgacaaataacagtttgttagtaatggttgaccatgctaagcggggaattaccattgctcctgaattatatgataaaatgcaaaacagacttgttatcattgaccaccaccgtcgcggcgaggactttcctgaaaatccattgcttgtttatatcgaaccatatgcttcatcaacttgtgagttaattacggaaatgtttgagtaccaaccacgtgaaggaaaaggacttaacaagcttgaagcaacggcaatgctaacagggattcaggttgatacaaaatcattcaccaagagtgctggtacgcgaacttttgatgcagctagttacttgcgttctgctggtgccgatggtttaatgattcaatcatttatgaaagaaaatccagaaaccttcatgatgcgtaatcatttgatttcaagagcggaaataaatgataaaatagcattatgtacgggtgaagagggacaggtttatgatcctgtcacggctgcccaggctgctgatatgttgctccaaatgagtgggattgaagcttcatttgtaatttttgaacgtgctgataacaagatcggaatttcagcacgctcaatgggaaatgtcaacgtccaggtaatcatggaaaaaatgggtggtggcggtcaccttgcaaatgctgctacacaaatcagtgataaagatattacacaggtcaagcaagagttagttgatattctaactaaacctgataaagagcaagacgatacagaggagtgatcataatgaaagttatttttacacaagatgtacgaggccgtggtcaacgtggtcaaattaaggaagttccagatggctatgctcaaaactacttaattaagcgtggattggcaaaacaagctactaaagcggcgatgagccaactaaagggtcaacagcgtgctgaagaaaaacatgctgctgaagaattagctgatgccaagcggatgaagaagattcttgaagatgataatacagttgttgaattaagcggaaaagccggtacagatggccggatgtttggttcaatttcaacaaaacaaattgcaactgctttacaaaaacaatttgaccttaaaattgataagcgaaagattgagctggcggctccaattaaggcgcttggctacgtaaatgtgccaatcaaacttcatccagaagtcgaagctcaaattcgtgttcacattgctgaaaagtaatgaggattaatagatttaaggagcggtatcgtcatggataatgcaccagtgcaagaagagccacgcgatattgaagcagaaaaagcagttcttggagctgcttttttaagtaaaaacgcgttggctgatgcgatggaatatcttgagccgcaagatttttatcggaaggctcaccaaattatttttgaaaagatggtccaactaaatgatgcggaccagccaatcgatccgttaacgatgaaaaatgtccttgatcaggataatcaaacggaaaatattggtggcgttgcttatattgctgaacttgcaacagcggttccgacggctgctaatgttgtctattactcaaagattgttcatgataaggcgatttcacgacggttgatcaatactgcaaccaagattatcaatgatagctatgccggaaatgataaaattgaagatcaacttgaccgggctgagcaagaaattatgtcagtttcggaaaatagtcgtcaaactggttttaaaagtattagtgacgttttacaagagtcaattaatcatgtcagtgagctctctagtcaagattcagagattactggactttcaactggatatgctcaattagatgagatgacgactggcctgcataaagatgagttggtgattattgcggcacgacctgctgttgggaagactgcctttgttttgaatattgctcaaaacgttgcaactagaaccgataatacggtcgcaattttcagtcttgaaatgggtgcggagtctttagcaaaccggatgctttgtgctgaaggaaatattaacgctaaccacttacggaccggacagcttacgcaggatgaatggcaaagtttatttattgcaactggtgccttgagtaacgctagtatctatattgacgatacaccaggaatcaaggtagcagaaattcgggcacgttgtcggcgcttagcaaaggaaaaaggcaacttaggattgatcgtaattgattaccttcagttgattgaagggagtaatcctgataaccggcaacaagaagtttcagaaatttctcgacaactaaagaaactggcaaaggaattagaagttccagttattgccctatcacagttgtcgcggggagttgaacagcgacaagacaagcgcccggttttatctgatattcgtgaatctggatcgattgaacaggatgcagatattgttagtttcctttatcgtgatgactattatgagcacgatgaagattcggaagataataataacccgggaaataatcaggatgacgatggatcaaatgctagtgaagttgaagtcatcattgaaaagaatcgtagtggtccgcgggggacagttaaattattatttgcaaagtcttataataagttcacttcgatttcctatatccctgaagataataattaaaaactaaatttctaagagggcatttcagtaaaaactgaggtagcccttttagtgcgcttaagacattaaaaatgttttaaaaaaaataaacggtatgatagtaattgaggaggcgtaaacaatgaaccgtcaaggcgtagaattaaaatggcttttattcggaatgtttcttggaagtattgggaatagttttgtctggccattaacaacaatttatattcacgatcagttgcatgagtcattaactgtatcgggaatcgttttactcttttattcgggagcaaatgttgtcggaagttatattagcggaatgctatttgaccgagctaacccgcggaaattaatgattggcgggacactgctagcgacaatcgtaatggctattatgattttcttcaatggctggccgatatatggaattcttttaacagttattggattctttaatggctggatcattacaatggttaattcttttgcgactcgttcaggtcgagatggtcgttatgtttttaatatgttgtattttgccaataacttgggaatggtgattggaactactattgtcggcccgctttatcagtatgcagatggcaatgtttcaccaatgtttttgattaccacaatcctttatacaatgttctcacttgttgttatctttttctttaaggatagtcaacaaacagttgcaaagaccgaagatatggaagctgaagaagagaacaagacagttaatattaagatacctcaagctaacttatggattaactggatcttcttcattgccttagttgtaatctggacaatgtatgaacaatgggcaagtaacctatcagttttcatgactgatcaaggaatctcgatgacaaaatatagtcttttgtggacattaaatgggattttaattgttgttttccaattaggaattacttggcttaatcgctgggttaatcggccatatgcgcaagtatttattgggatgtttacaattggtttctcatttgtcttattactttacgctcactcatatagctggtttgttgcggcaatggtcgttctgacaatcggtgaagccactgctctgccaacaatgcctgccattgtaaacagcctttcaccggttgctgttaagggaaagtatcagggaattctgaacgcattttcttctttaggaaaggcaattggtccgctatttggtggattgatgattgaagcgacctcttatcatatcctctttattatttgtgcgatttcaatttttgtaatggaaataatagtagtctttgttattaagataaaacgtgcaaaagcagttgaatattaaagaagtgattagatgttttataataattttgataatgtccatggtgaagaccgttatggaatggtaggaaaaacaggagatccttttagggaagaatgtaaactagggatttcttgttatcagtgccatgaacagccgttagtaattgcggaaagaaattggatggatacgaataatgatgactcgcaacggtatcaaattgtggtagtttgtgagcattgtggtgctgttgatgaatttattgttaatgatggtcgagaacaccaaattggtaaattaaaacatagtaaataccagccaacagaaaagaatattataaataatggagctgtgaactagaattgttcatggttctttttttaaatccgtttttattaaccaaaacttgagagatttgctatgatggtagttaaaatcaaattaaaagcaatgaggtgaatgttgatgaaaaccaagaaatatcgttacacaggaaaagactttgatattaagacggcaccaactaaggtaaaagattctgctgatgatcttaagaagattaaaaagaagatcaagaaaaatgtaaagtcaatcaagaatgcgcaaaagatgatgtatgcgcggcgtcattatggtgttttagtagtatttcaagcaatggacgcggcaggaaaagatagtatgatttcgcatatttttgcgggcgtaaatccagttgggtttaaggtggccaattttaaacaaccaacaggccgcgaattacgtcatgattatctctggagaatcaatcgtgaattgccaatgcgtggtgatattggtgttttcaatcgatcttattatgaggacgttcttgtttcacgcgttcaccctgctttaattttgcaatctaatattccagggattgagtctgttcatgatgttaataataaattctttgatagtcgttatgaagatattcgtcagtacgaaagttatctaacgcggaacggttacttaattgtaaaattcttcctccatgtatcaaaggaagaacagaagaagcgtttcttagcacggattgatacaccagaaaagaattggaagttttctgcagctgatattcgcgaacgtcaatattgggacgattaccaaaaggcatatgaaaaggcgattaatgctaccgccacaaaggaaaatccatggtatgttattccggctgatgataagtggtattcgcgtttaattgtatctgatattttgacaaagaagattaatagtttgccattagcttatcccgaggtttcgccagaacaagaaatgagtttactccaagcacgaaaagaactaatagcagaagataagtaaataaaaaggacgtccgaatgacgtcctttttatttacttggtttaaagatgtacttgtgagtaaagaagtagattgctaatgtagaacaaagtattagaatgttaaagtttttgtcgggtaaggccaaattctttgcgttgaactgttcaccaaattattaatttactcatcgttattagttaaattagattattcattcaaaaaagcagttttcaaatatatgtttaagtttataaatgcccaaaaattgatttttagtatttatatattaacttctaatgataataacccctgaaaatctattttcaagggttattatgttagtattttagtataataacaccaaaaaatagctttttagctttaaggagggaagataaataatgaaatacataccattatctaaatataagtattttattgaagataagacgaatgacccggcagcaattgaaagtgaatatcagagtcgactgaacggatatacaagccagaagacaactctgtttcctcttcttaactatcgcgatggtgcacagacaagtaaatatccaattttctatcttccattaccggaaattcaaaacctggcggatcagcttaggcgtaattctaatatgattaaggatatctctgtaacgcttccccaagttgcgattaatcaatttttgaattcattattactctctgaaattttctacactaatgatattgaaggtgtaaaaacgagtcgtgttgaaattagtactgttattcaggaaaataaccacccaataaatggtgatgatcatatatcaaagaaaaggcttggttcaactataaaaatgtaccagcgcacacaatcaggaaaaaaagttgaaatcaatgttcttcaagactatagaaaaatctatgattccttgttaaaaggcgaacttaatgaagatcgactgcccaatggaaaaatatttcgtgataagcttcctaatagcgaagtgctttcgatcggggatggcattaaaacagttcatcgaccaccaaccacggaaactgcaatcaaggttgcccttacagctttaattgaatatatgaataatgatgatactccttcaatatataaagcccttgtaactcactttttctttgaaaatacccatccatttcttgatggtaacggtcgaatggggcgttatcttttatcgtcatatattactaacaaatttgatcgctttactggcttttctgtggctactgcaattcataataatgttcagcaatactataaggtatttaaggatgccgatagtgcggaaaatagagctgatttaacattttttattcaaaaattattaatgatacttgttagtcagcaggaaaaagtaattaagattttgagtcaatctcgtgaaaagcttgataaagccaatgaaattattagtcagtgggtcaatgaacaccatcatcaattagctgcaacgtctgatagtttgtattgtaatgttctatatcttcttgcacaatcaaagctatttactaaccagttagatttaggaattaaagataatgatattattgaaactttgaagaagagtaatcgccgttatccaatgacaaagactaaggcagccattgaagaactagaagcacttggcgcaattgaaattgtttctaagcgtcctaaacaacatgtaattacaattttataataaaaaaaaagaccaccgattactcggtgatcttttttatatgatgggcagtcaggggatcgaaccctggacccacggattaagagtccgttgctctgccagctgagctaactgcccatgtctttgacaacataaataataatatcaacttccgatcattttcgcaagtgtttttctgaatttatttaataaattttcaaatccatattttaattaggtgtctaactgttataattaacaataaaattaaaattgggagtaattttatgacattaaataaggataaatttgagcaaatgaaccgtttattgcggaactatatgattaacatgaagcatttttatactgaacttgcccctgaattagatataactccacagcaagcacatacgcttttttatatagaaaaacacgctgggcttattcaacgagaattaggtgaccatttccatttacggaatgctagtgttactagtatggtgaaaaatcttgaacgcgacgggtatattatccggaaggcggatcaagagtcagcacgaattaagcgtatttttcttaccaaaaagggtgaagaaaagactaatgaggttaaagaaatatttgataaagcttatttgcagattattagccgcctcgatgaaagagatattgatgcaatagttaaagggatgactaatattaataacaatctaaaaaaataagttaggctcttgacagttaggtatctatgtgtttaaatattcatcatcattaaaagttagatatttaactgttaggaggcttatgctttgagcagaaataaatttagttttcgaagtttctttagtttaataaatcaattacatccgcagtatattaagctttttgtgggaatcttactaggttttatctccacgggtgctaacctatttgttcctcaactagcgcaaaagttaattaataattttaagagtattagtctaacgttggcaattttaacagttgtaatttttatagcaggattaattacaagtgcgttatcagggttattattaggaatttttggtgaaaatattgtttctaaattacggaaacaattatggcaaaaactacttaaaatgcctgtaaaatattttgatgatgttaaaacaggcgaaatcagttcacgattagttaatgatacgtcacaggtgaaggatttgcttgcctcaacattaccaaatgcaatgacatcgcttttacaattcgttggtgcactggttattatgttagcaatggattggcggatgacattgttgatgtttgtggcagttcctttagtgattttagtcatgctaccagtgatgaatcagtcgcgtaagattggtcgggttcggcaagatgaattagcaaaatttgctagtgattccaccgatgtattgggtgaggtccgattagttaagtcttcaaacggtgaagaacatgaactggcaaagggaaatcgtcgtatcgacaatttatatcatgtcggaagaaaagaagcgttgattaactcagtaacgcaaccaattacaaacatgctcatgatgataatgtttcttgggattcttggttacggagcaattcgcgttatgaatggtgcaatgacaatgggcgccttagtttcatttttaatgtatcttttccaaattattagtcctgttgttgtaattagtcagctctttaataatatggcaaagactagcggagccacggaacgtatccaacaaatcttaactgaaccagaagaatttgttgctgataaagatgaaaaagatattgtgagcgcaccgttgaaatttgagaatgttgattttgcatatgaggaaggcaagccagtcttacgagatgttagttttgaaacccaacccaatgcagtggtagcttttgccggtccatctggtggaggaaagtcaactattttctcattaattgaacgattctatcagccaacaggtggaaaaattttgatcggtgaagagaatatcgaaaatgtagacttagccaagtggcgtgaacaaattggtctcgtaagccaagatgctgcggtaatgccaggaactattcgtgataatttaacttatggattacgaagagaagtctcagatgaggaattttgggatgcattgagaatggcttatgcagatggttttgtcagtgaaatggaagatcagttagaaactgaaattggtgaacgagggatcaaactttctgggggacaacggcaacgaatagcgattgcgcgagcttttctccgcgatccaaaaatcttaatgcttgatgaagctactgctagcttggatgctgaatcggaggcaatggttcaaaaagcattgggagacttaatgcaaggaagaacgacactagtaattgcgcatcgcttaagtacgattgtcgatgccgataaaatctactttatcgaaaatggaacagtatccggcgcaggaacccatcaagaattattaaagacaacaccactatatgcacagtatgttaaggatcagtttaaataaaataaagactgcgaaaagataagattttcgcagcctttattttaagtatgaaaaaagcgactgagataaaatctcaatcgctgtaaacctctgatgggcagtcaggggatcgaaccctggacccacggattaagagtccgttgctctgccagctgagctaactgcccatatcctttaacagaatacttaaacagtttaacctgttattgatcaaatgtcaaatatttttcataagtttttagaaaatatttatgaaacttttccctgtgctataatagaggcactgatatatagcagatttaaagtaattaatcaattaacccaatggagggaatcattgatatggcaaagaaaattttagttgttgatgatgaaaaaccaatttctgatatcatcaaatttaatcttgaaaaagaaggatatgaagttgtcgtagcctatgatggcgaagcagctttagaacaagtagaagcagaaaatcctgatttaattattcttgacctaatgctgccgaagatcgatggacttgaagtggccaagcgggttcgggctaagcataccatgccgattattatggtaactgctaaagattcggaactagataaggtgctggggcttgagcttggggccgatgattatgttactaagccgttctctaaccgcgaactagtagcacgagtaaaggctaatttacgacggcaagcaactctgaaggcaccggcagaagaagaaaataataccgatattcaaattggcgaccttacgattcatcctgaagcctataccgtaactaagcgaggcgaaaatatcaatttaacgcatcgtgagtttgaacttttacactatctagctcaacatattggacaagttattaaccgcgaacatcttcttcagactgtatggggttatgactattttggggatgttcggacagttgatgtgaccgttcgacggcttcgtgaaaagattgaagataacccgagtcacccccaatggttaattacccggcgtggtgttggctattacctagcaaatcctgatcagaattagaggctgaaccattgtgagcagcaagttaaaattttatcaatcgattcgttttaaaatcgctctcgtattcgtgttaattttgatgttaacacttgaatgtgttggggcggtttttgtgcgtcaattagagcatcaaaaccttaatacgtttaagcaaaccattgaattaccgtcttacgttgataattctttagcagagcagctatcacgatcaaatactaaaaaagcaaacaaacaaattaaccaaatcctttcagaagttaataataataatatttctgaaatccgggtggttgatagtaagagtattgtgcggggaacaagcaacgctgataatcggagtgcaatcggtcagaaaacaacggaccaagcaatcaaagcaaccttattaaataataggtcgcataccgaaaatttatacgataattcaaatcacacgcgctactatgtcaatgttattccccttgtggataatagtaacaataacgttgtgggagctgtttacctgcgagctagtctagaaagtgtctacgctaatattaataatattactttggtatatctatctgcggcgatgattactattgtcttgagtttgatcttggcaattattatttcccaggaaattacccgcccaattgaagaaatgaggaaacaaacattacgaattgcccggggagactattctggtcaagtaaaagtattgggaaatgacgagttaggacaattagcaggagcagttaataatctttctgtccgggttgaagaggcacaggagtcaagcgattctgaacgacgacggcttgatagcattttatcccatatgtctgatggggttttagccactgatcgtcgagggaatgtgaccattgtaaataatatggcgttacagttactaggtgtcgaaaatgaagatgatttaattggtaagtcaattattgatgtgttggatattcgtcatgactataccgttcggcaactagtaaatggtgaacagcgcgagatgattattgatatgtcaaactctggcaataatttgatcttaaacgcctacttctcaccaattcaacgcgaatctggctttgtcagtgggcttgtctgtgtccttcatgatgtaacgagccagcaaaaagaagaacgcgaacggaagcaattcgtttcaaacgtctcacatgagttgcggactccattaacaagtgttcgaagctatgtcgaagcattaagtgatggtgcttggcaggataaagaaattgcccctaagttcttaaaggttgttcaggatgagacagaccggatgattcggatgatcaatgacctgttgagtctatcacggatggatgcagggacaacgaagctcaatctggaatacgtaaatatcaatgagttatttaactatatcttggatcgtttcgatatgattattaaaaaagaagaagatccaaaaaagaaaaaatataccattgaacgatactttactaagaaagatttatgggttgaaattgataccgataagtttacccaggtaattgataatattatgaataacgcgattaagtattctccagatggtggtgtaattacaacccgcttactggagacgcataatcatgttattttaagtatttctgaccaaggtttagggattccacgaaaagatcttggacgtatctttgatcgcttcttccgcgttgataaggcaagaagccggaagcaagggggaacaggtctgggactagctatttccaaggaagttatcaatatgcttggtggacaaatttgggttgatagtgtagaaggcaagggttcaacattctatatttccttgccatatgtaccttatgaggaggaagactgggatgatgaagaagctgaaaagtaattggcaagcaatcgccttaacggttgttgtgcttcttagtttattcatttcatggattgtctggaccaacccatttccttttgagggagcacgacacgaaaatttcaataataaccaatcacaacaatatacaccgcaatcaaggggcgatgtttatctcccaactaaagcagttgagacaaatgaaaaaggaactcagaatcaactttatagccctaaagctaatttaattctgagcgtaaaaaaagagttagaggattggaaattaggccggacaaatgttgtcaaacaaaataacagtgatgtttatttgagttatttgcgacggcggaactcgttaatgctgacatatccggatgaggtaccgagctcagtcttcaacgaaacattttcccagtcaattgatactgaccgggttaatcagattaaccatattattatcccgctaaacgggcaacatgagatttacttacttggtgaccaccattatagtgtgtaccgagtacgggtagagcagggaaaatttaaccatattcggcaactcttaaagtcaatggatcgaatcccagttgaccataaaactattaacggagtagcagtaatgatgtatccccggtcctttgagttaccagcattaggatatcaaatcactgcgcaaaacattgatacccttagtgctagtctaatgagtactaaccaacacacaacaattacggcaaatcggaatggcaacgagactacctatacggatggaaccaatcgtcggctgatatttaatcaccaagatggaacgcttaaatacgaaaattaccttagtacggacgatcgggaatcaacaagccagattttcccacacttctataataagttgacgacaattggaattccgcttgataatttgcgctatgatgaggtgagtgagcatggtcgtcggttaaactatcgggcttatgttaatagctttccaattttcaatagtgatggttatggagaagtaacgcttgaatctacaagtagcgggaatgaacgcttctggctaagtctttatagtcttcgagtgccattgccaattgatcaccagatggtcaagcttccatcaagtgcagatgtgattaatcaattacatgcaaccaaccggatgcgtgacatcaaggacttacgtgtcgggtatatttggaaaactgataaagatagtcatgttgtaaagttagtgccaacgtatttcattaagtatcgcggccactgggttgaatataccgagttagaaaagtaggagggttaaagaatgaattttaaacgtattcaatggatctttatccttgcctttttgctttttgatatctttgttggaagttcattaatcttagaaactagatttaccgtttctaatggtcagcaaaatcgccagtcaacagtgttaaaagaaatgcgcaatgactcgattagttatggcgagctttctaataagcagcaaaccggatattatattgctggaaagaaatcctctgatagcggagtcctagagcaagaagccgggaaattacgtaatcaaaattttcgtctttcttcaggaacactaactagtgagtttgataagccaattaaaacaactaaaaataatgagattcggcgtgtcgaccgtctattaaaaaataaaaagatggtaagtttaggaaatcattatcgctataacaaggaattatcggacaaaaatacccttgtttatacgcaaatgctagaaggaaagccgctattttcaaatgatgggcaaattcgttttcggataaactctgactgtgagataacaggttatacgcagacttacttgcaagatgttgaaattctccggcaacggtcaaatacgattagtcagcgccgagcaattacctggttgtataaacataatcaaattcctaataactcccgcattaggtggtcggtgctcagttattctaagctccttaacactactactgatgataaagcagtctatgtgccaacgtggactgttgaaatcaaaactaaaaactcaggagcaattcaacaattacaagttaacgcatttaatagtacagttatgaaggaaacaccagatagtgtgaatacgaactcgttaaataataagtaattgaggaggaactttaagtgacagaaacggatccattacgttatagtatacttgcgagcgggagtactggaaatgtaacttatttggaaacgcgcaaccaccggatcttgattgatgctggtttaagtgggaagcggattgaaaatttaatgaagaagattgatcgatcattaaaggatgtcgatgcgatttttgtaacgcatgaacacagtgatcatacgcatggtgttggtgtcttggcacgtcgctatgggatggatgtttatgccaatgaaggaacctggcaagcaatggccaataaagttggtaaaatcccattagcacaaaagcatattattgcaccaaatactgttaaggacttgggagacatggatattgaaagttttgcggtatctcatgatgctgcgcaaccgcaattttaccaagttcaccacaataataagaccttctgtattattacggatactggttatgtttctgatcgagttgagggaaccatccgaaatgcagatgcctacgtaatggaatgcaatcatgatacagaaatgttgcggatgggtccttattcatggccattaaaacagcggatattaggggatgagggtcacctttccaatgaagaaggtgccgatgcattgatgagtgttgttgggcggcgaaccaaagagattttccttggtcaccgtagtcaacataacaacatgcgttcgctcgcccacttaacagttgcaagtttgatggagcagcatgactttggcgtcgatcatgattttaaattgcaagatgctgaaccagaagaaccaagcaagttaatgacgttataataaagagatcacggtttttatcgactttattcaatgatttttcatatttaaattgtaatttgaagatagtaattctttaacttagtggagggtttaattggtgaataggataaaacaagcttttaaagatcgattgtggctaggcgtaattattgtcggcttatttgctggtcttatcggtggtggaatcgccttaggaattaataacctggtacaacatcatgaagaagtaacaagtacacgagttccagctggctctaataagtctggtggtacgaaggttaataagaataaggctgacttaaacggggaagcgtcccaagcttataagtccgttcaaggagccgttgttagtgttattaataaacaaaaagttcagcaatcaagtgggacgctaggaatttttggttatggcagtagtaacggaagcaacagtgattcttctagtgataataaattagaaaccgctagtgaagggtcaggagttatttataagaagagtggaaattcggcttatgttgtaactaataaccacgttgtcaaaggttcaaacgcactccaagtaattttaagcaatggtaaaaaagttaatgctgatttagttggtgctgattctgcaaccgacttagctgtattgaagattaacgctacaaatgttaagacagttgcatcctttggtaactctaattcgattgttcctggtcaggatgtgctagcaattggttcaccaatgggaagtgaatatgctaatacagtaacaaaagggattatttctgccaaagatcggacattaaaagccgggactgatggaactttgacatcggttatccaaacagatgccgctattaactctggtaattcaggtggtccattaattaatatggcgggtcaagttatcggaattaattcaatgaaacttgcttctgatacacaaggctcttcagttgaaggaattggttttgccattccaagtaatgaagttgtgacaattattaaccagttgattaagaatggtaaaataactcgtccatcactcggaattagtatggtggatcttagtaatgttacttctgatcaacagcaatcagtcttaaaactaccaacaagcgtaaacaaaggggtagtgattatggatgtgaatagtggttcagttgctgatactgctggattgaaaaagtatgatgtcattacaaagcttggtgacactcaagttacagatgcgggttcattaaaggcggccttatataaatacaaagttggacaaaacgctaaagtcacttactaccgtgatggtcaacaacacaccgcaactttgcatttaacaaagagtgctgatacaacatcaactgatgactcacaacaagataataattagtgaattgggagcgagacagaagtcacttttgacttcgtttttcgacgcgaagctagcctctgggagcccccgcaagcaacaataggtctccaacgttcggttttgccggacgttggagaccattgttgtactgtgtatgtgcttttaatgaaagtaacttaacttctgtcttgcttcctttcattaaaagcctcttaattaaaaggggtataatattagttatcaatataaaggatggtgggtaaaatgaataatccacggtttaaatacccagatacaaaggcatttgaatttgtagtacatcgtttagaagaacgcggagtaaacttagacgaacttgcgaagattgtgtatgagacgcaaaaaagttttgaacctgacctaacaataaaagaatgtcagaaatttttgattgatacaatgcataaacgtgaattattaaatagtacaatggtagcccttgagctcgatcggttaaccgaagaaggaaaagtcgatgaacccctagcaagtattatcaaaaatgatgctggtgtatttggggtagatgaaaccctagctttacaaattgctaatatttatggaacaattgggacgacaaactttggttactttgaccgggttaagagtgggattattgccaaatttgaccacgataaggttcatgtaaatacatttattgatgatattctcgcggcgattgtggcggctgtttgtggaaagattgcccaccagtacgcttgattaaaataatctcattgacttttaaataatttatcattaaaataaacataattcgtttagaggagtaaagcaaatgagttatcaaactttacaattaaattatagttggcaaagccggtaactcagggatagctgtagtacagatatgacctgggtttattcacagattatatctgtaccggctgctttatcatgtacaaataaggcctgtacggatttcacgcacgggctttttctatttcactggataaatagtgggatttccgaaacgtggagctcctttttattttgaaaggtggagatagggatgaaacgaattatgggctatattattattggaattgttgtgattggtggttattttggacttttaaggcttcatcaacagaccacaaaaccggtggtagggattttaacgatgatgcatcatccggcattagatcagattcaaaagggggtcgttgccggattagcagaagaaggataccaaaacggaaagaatatcaaaattgaataccagaacgcgaatggtgatcaaggaaacttaaatactatggcaaataaattagtgaatgatcatgcgaaagtaatcgttggtattaccaccccagcttgccaagcacttgctaatgcgaccaaggatattccgattgtgatgggcggaattggtgatccggttggtgccggtttagtaaagaatgaaagatatccagaaggaaacgttacaggagttcatgatgtgaatccgagtgaacagcagattgccttagtaaagaaatttataccaaatattaagaccctaggagtaatttacacatcgagcgatacctcttctgaaagtcagtaccaaacgatggtaaaagcagcgcataaattacatgtaaacttaaaaacttatacaattgcgaatgctaatgaacttaatcagacttcacaaacaatgttgagtaaagtagacgcggttattgttcctagtgacaatacaattgctggatcaatgggagtattggtgaaaaatgcagatgtggtcaataaacctgttttcccgagtgctgatacaatggtaaaagatggtggagtagcttcgattagtcttagccaatacgggcaaggaaaagcagctggaaaaatggcagcacgtattttaaaaggtgaaaaaccaggacagatggcagttaataattaccatcatggaaaaccggttcttaatttaaagcaggcacataagttaggaataaaagttccagcagattttcaacaagaagcagaacaacatggaacagtctttaagtaagataatgggaaaattccgaataataagaaaaattaaagaagataacattcgctaggtaacattccgttgtatatttaccacagattgtgttgtaaatcgttagaaatacgttaaaatgataatgtgaaattgcttgtggataagtcagtggataactaacagtaactttaaagtaattttataaatgttggtatatcaataaaaattattgttcaaaacttatccacaagctgaatatgtgtttgtggataagtggaattctttgtcaacgttctgcaacgacgcttactggcgcaagggatagccaagtcgttgctgaacgattgttcctgtagataactgtggataagtaatttttaagaaaacgcttttttaacaaaaaattaaccgaacattcgggaaaagtaaaaaaatcaacgcaggcctgtggacaactttgtggataaactgtggaaggtagtggatatcttgaatataaaaattattggtgtgggtaagttaaaagaaaagtattttaaagcgggaattgctgaatatgctaaacgacttggacgttattgtaaatttgaaattgttgaggttcctgatgaaaaagcacctgaatctttaagccaagcagaaatggatgaagtaatggcaaaggaaggggaacggattcttgataaaatcaaagatcgcgaatatgtatatgctttagcgattaaaggtaaagaacgttcttctgaagagtttgcaaacgaaatcaataaattaacaacttatggtcacagtgatattacttttgtgatcggcggttcattagggttaagtccagcagtattaaaacgggcagatgcccaaatttcgtttggaggttttaccttgcctcatcaattaatgcgtttagttttaagcgaacaaatttatcgagcttttaccatcatcaatggcctcccatatcataaataaagaatttattgagttttggttagattattatttatcgttgttagcgatggtatagtgtaaatatgaagtgtaatggcataagaattaaaggatttgatttaaaataggcatacgaggttaccaagtaattcttttaggggtaatagcaggaatatgcattttagtgatgcaaggaaaagcaagtgcaatgatagtaaatgaagcacggctgacattgcctaatgaaaaaagaattgagtatgatgaatttgaacggtaccagtttcgggcaaaacagttacgaacttggtggcaagtcaagcgaccaaaatataaaattgattggtcattttatcataagaaacggggatactgggattagctcaggtcctcgtttttcttttaactttcccgaaatgtcaatttaagttagaaagaaagtagttgctcatcagtgacgtaggacatgaatacctcatatggagttcgatagcctagtgatttgcggggcaggttatttcgcttactcatcagttgggtcaccaattcatcaggaagattgcggaaatctagctgttttgttaagccgtcccggcgtaaaagaccgttgttgttttcgttcagccctcgttgattgggagcaccaacctcggcaaagtaagtgtgaaggtcaaattgattggcaatctcgcgccagccggcgaattcttttccgttgtcaaaggtaatcgatttgaagaagtgctgcgggaatttccgaagccactgacctaagtgttggttaatcgcatcagccgtcttttcgtgcacattgagtacaatttcgaccttcgattggcgttcggtcagggtcattaccgccccttggtgctttttgccttggacggtatcagcttcaaggtgtccaaattcagtggcatagtgcggaaagtccttggcacgctcgtgaatacttcgccccaattggccagccttcccgcggcgctcaatatagccattcgggtgccgcttacctcgcatgggcaaagcacggacatccaaaccgaactgcccccgttcaaacatccggtaaagagttcgccggttacaactaattgggcgctcagcgcgcccaataatggtgtcaggcgtccacccctgggcaattttgtcgttgatataagtaagttcagccagtgacaactgagtacgttttcggccacaacgttgcttattgcgcatatagtgatcttgataatcagcaattgaggcaccggtttccaggtaacgataaacgcgataaacggtttcggcgctacggttgatcatttgggccactcggtacgctttaagcttttgcacgaaagaatgggcgatgattgtcagctcgtttgtggtaagatgggtgtaagtcatttgtggtttcctttcttttgtttaggggtattcaaaagtctaccacaaatggcttttctatttttctaacttaattttacaaacggcgttttcaaaaaagctattaaaatgaagatattaaaaggaggcaatgataatgaaaaaagttgggattatagtcggcagcgttcgtccaaatcggcggagcatgcaagtagcaaactggttaaaagttcaattaaagaaaagtacaaaggttcaatttgacatcatcgacctaaaagaagttaatttaccgatgatggatgaacctaaaattccttatttgggtttatatgttcacgaaaaaacgcgtaaatggagtgagttagtacaaagctatgatggttttgtgttagtttttccgcaatacaattggggctatccagcagttttgaaaaatgcgattgattacttaggaaaagaatggcaaggaaagccggttagtttagtaacattcggtggacatggcggcttgcaagcacaaattgcaatgaaattggtcgtaaccggcttaaagatggcggcgcttcctgttgatttacaaattaacttgatgccggatgattcaactgcgactgctgatcggaagttgaatacttataatacgcaagcagcgttattaatgactgcttttgaaaatgagttaagctagtttgtgattaaagtagcaaattattgtaggacattaatataaaattggttcaatttgtgaatattatgacaaacatcgtgatattgcagcagattaggcaagattattattacaaattgggcgataatgaacaaaaaatcaaaatgtttctattgcaaaaataaaacgcttgcatgataatggaatcgtattcaaatgccatgaggagggtatttttaatgaatagacaatttgatttcttaatgccaagtgtgaacttctttggtcctggtgttattgccaagattggggatcgtgcaaagatgctcaatatgcacaaaccattgattgttactactgaaggtttatccaagattgacaatggtcctgtaaagcaaaccattgcttcattggaaaaggctggcgttgactatgccgtatttactggcgctgaacctaaccctaagatccggaatgttcaagctggtaaaaagatgtaccaagatgaaaactgtgactcaattattactgttggtgggggttctgctcacgactgtggtaagggtatcggtattgttttaactaacggtgatgacatttccaagcttgccggaattgaaacattgaagaatccacttccaccattgatggctgttaacactactgccggaactggttctgaattaactcgtcacgctgttattactaacgaaaagactcatttgaagtttgttgttgtttcatggcgtaacattccattggtatcattcaacgatccaatgttgatgcttgatattccaaaagacattaccgctgctactggttgtgatgcttttgttcaggctattgaaccatacgtttctgttgaccataacccaattactgatagtcaatgtaaagaagctattcaattaattcaaactgctttaccagaagtagttgctaatggtcacaatattgaagcacggactaagatggttgaagctgaaatgcttgccggaatggccttcaataatgccaacttaggctatgttcacgcaatggctcaccaactcggtggtcaatatgatgctcctcatggtgtttgctgtgccttgctcttgaccactgttgaagaatataacttaatcgcatgtccagagcggtttgctgaattggctaaggtaatgggctttgacactactggtcttaccctttacgaagcagcacaaaagtcaattgacggtatgcgtgaaatgtgccggcttgttggtattccatcatcaatcaaggaaattggtgctaagccagaagactttgaaatgatggccaagaatgccctcaaggatggtaatgccttctctaacccacgtaagggtactgttgaagatattgtaaagctttatcaaaaggcttacgatggcatctactaataattaaataaacacaaagaggctggaaatcagctcagtctctttactgttttacgtattaaactgccagccaaccttacggaggtgggactatgaactagccaagctaattctgtccccctctttttttgtctacttttaattcttaatattttgaatttttttcacaaagttacttgcaagcgtattcttttgaaactataataaaaattattctaagagagaataagaggaaaagagaaaatgatatatttacttgctttaattccagcaattggttggggtgcgatgccattaattactggtaaaattggtggttcaccagttaatcaaatgtttggaatcggtgctggagcttcaattgtgggaattattgcatatttgataacaaaaccaaccgtcagtgtaactgctttttggttctcgctagcgatcggttgtttatggacaattggacaggttggtcagttcatctcgtttaaacatatgggagtttcaaatacgatgcccctttcttcagcatttgtgttagttatgacgtcgtttgtcggcatctttttctttgatgaatggcaaggagccagagcattaagtattgggttgacagcgtgtgtagttgtaattattggggctgttttaacctcgatttcggacggaacatcggataaaaaggtttcgactaagtgggtattatttttattagtaacaacaattggttactgtgcttattcgatttttcctaaaatgccacaggttgctcatgaaagtagtcagggtattttcctaccagaagtattaggaattttacttggttcagtaatttatactatttgttcgggtaacgctaaagcatttaagcaaaaagaacaatacttaaatattttaggaggactttcatgggggattggtaactttgcctatgtttttgttggtaaagctcttggagtagtgactgcttcaatttttggtcaaatgaatgttattatttcaacatttggtggtatcctacttttgcatgaaaccaagaccaagcgagaaatgatatatacagtagttggaattatcctaattgtaattggtagtattttaacagtaattgctaattaattattgaagattttaggtaatatcaataaatgagagaggaaacgcgcaaaatcagctttttaaccgattttacgcgtttttttagtcttatattatttcccaggttatattgtgctatttcttatcaagtagatcaaacctaatttgtccaagttgtaatttttcaggttgtttagccccgtggaaaatcagtttaaataatcgattttcaacgccagccttgaaaacaagttgtttatcgccaatattaattgtataggtgtcaccttcacttactacttctgcctgcaagagggctgaccattgtttagcagcctcttctggatcactaacattaaagattgcttgcttaacaaaaaggtcacctgccggatggaatttaattaagccctgtttcttgaggtcttcccggcgttgatcatcgttgttgccccattgaataaagaatggtgcaggtaaatggttaacaagttcatcattgacatagaaaatcttccattgaataagtttaccggcaggatccacgcgctttccatcagtaatatcaccaacattaagccccagaccctctaatcgctggtgagtttcttcaatattgtcagtccgaatggcaattgttgtgatgcgctgaataccagcaacataatcttcaacggcatcatgaattgctgagttattttcatatgggaatgccttagctttttccttattagcgatggttaagagctcaatgtaattaaggccaaaataatctagtgcattttttgttccccaatattcgtgatgtccaccaggggtaaaggctaaacctttagagttgaagtaatcaattgcatcttgaaggttagttacatcaaccattgtatgatcccaatttaacgtttctgtcattttaatcacccttgttctgtttgcctaattcctttgttcgtttaacagcagcaaggacagcattttcaattcccgctgaaaaagtgcttttatctagttcatgctgggcggtgatacccactccgccagcagaattattaatatcaagtaattcggcagggtgtttaccactttgttctacaaatgcagcggctgcgcgtagattctcaagagcaagtttgtttgcttgttggcgaggcattccggcaagcacacctgcgtttgtaaaactaattagaaagttatagatatagtttggtccagccacgccatatccagtaaatacatctagcaaggattcatcaatgtaatcgacttttccaaaactatttagaaagtcttcaatgacagtttgattagctcgattgtttttaacgacgccgctataacccatggcaacatcagtcaaggtattggggatgatccgtgtaattgcaaaaagatcttcctgtgatgaaagttgtgcaactgttacgccggcaataattgaaagcacgtccttttggtagtggtgggcgacaagttctttcatgatctcttgccagttatcttgtggacgcactcccagaataacaagatcagcattctcaacagccgtccaatcaggttgttgacttgcttgaatatgataagtatcagtcaaataattaactcgattgctcgaaatatctgttatcccagttgtttcaggagtaattacttttttcttcagtgcagcccgcagcattgcttccaccatttgaccaccaccaaatgagtaaatcttaagtgtcattgaaacatcatcctttctatatgtacctaacctaatcgtagcgtatttcaaaccgagacgctaatttaaacacttctttcaaaaaaataaattcacaaattggtctacttgaaattaaattaacaaggaagcgtttgctgtataataaaattgttagttataaatataataaaagggcttttgtttgttaaaaaacaaaattttcaatatgaggtaattggattttgatggagtaatattagttgaattggtctatgaaatagttgtaaaatgtaagcgtttatttaaggaggaaccataatggcatatcaaagtatcaatccatttacgaaccaagtagaaaaaacgtttgaaaatacaactgatgaagaattagaacaaacattgactacggcgcatcaattatatttagattggcggaagtataatgaccttgaagaacggaaacgtcaaattttaaagttaggtcaaatattacgtgaacggcgtgttgaatatgcgacagttatgagtaaggaaatgggaaaactaattagcgaagcagaaggcgaagttgatctttgtgcttctttctgtgattattatgcagcccatgcagatgaatttatgcaaccaaaaatcattgcgacaacgagtggccgcgccaaagttttgaagcaatcattaggaattttagttgcggttgaaccttggaatttcccattttatcaaattgcccgggtatttattcccaactttattgcaggaaaccccatgattttgaaggatgcatcgaattgtccagcatcagcccaagcatttgctgatgccgttaaggaagctggtgcgccagctggcagtttaactaatttattcctttcatatgaccaagtaaataaggcgattgctgataagcgggtagccggtgtttgccttactggttctgaacgtggtggtgcaaccgttgctaaagaggctggtgctaatttgaagaagagcactttggaacttggtggtaatgatgcctttattatcttagacgatgcagattgggaccttgtcgaaaaagttgccccggcagcccgcctgtataatgccggacaagtatgtacatcatcaaaacgttttattgtacttgaaaaggattatgatcgtttcttaaagatgatgaaagatgcgttctcgaaagttaaaatgggtgatccgcttgatccattgacaactcttgctccactatcttctaagaaggctaaggagaagcttcaaaaacaagtagatacagctgtagaaaatggagccaaagtttactatggtaataagctggtagatatggaaggacaattctttatgccaacgatcttaactgatattactccagataacccaatatttgatacggaaatgtttgggccagtagcttcagtttataaggttagttccgaagaggaagcaatcgaattggctaataattcaagctatgggttaggaaacactatctttagcaatgattccgaacatgcagagcgagtagcagcaaagatcgaaactggaatgagttggattaatgcaggctgggcttcattaccagaattaccatttggtggtgttaagaattcaggttatggtcgtgaactcagtagttacggaattgatgaatttactaacaaacatctaatttacgaagcacgacaataaaaattaattaaacgacgcaaataaagggatcgcaagtttggattgcggtccctttagtattacctgggaaattattgaattcttttcaatacaatcttgcaatattgtcttacttcttatatacttagttacataagtgattaactacaaaattgctatttggaggaatattcatatgactgcgaaaagaaacagccatcataaatctcgattacgacaattatttgcaacacgtcgacgtcggtggattggcatcggtggcctaattgtaattataatttttgtattagtttcaattcgacatgcaagtgaggaaaaagcaacagaaaaaaatgaatataatattctacgggttactgagcagtcagattttaatctgacaggaaagattgaaccagtccagatgcaaacattaaccttgccatctggtaacctgcaaaatcttaatgtgaaaaacggagatcacgttgcgcaaggagaagcgctcttaaccatgcataatgatagtacacaagatagtgttactgaactgcagggagatcttagtaaaagtcaacgaacgatgaatgtccaacaacagacgattaataatttacgccaacagttgaatgggatggggcaaggtgatgaagggtacaatgacctgcgcaatcagcttaccgaagcgcaaaatgcatatgcagacgcacaagcaagtgttgctgccactcaacaacagcttagcaccgcttcaagcaaggttaatcaaacattaacagcaccttttgctggttatgttacggttgaccaatcaaagcaaaatgctcctgtaattactctttactcagatacgcttcaatttgtcggtcaagtttcggaatatgattatagtaaacttcatcaaagtgctgatctaaaggtgaaggccttagcaacaaaccgaactgctaatactcaggtaagttatctttcaacaattccaactaaaaatagtggaaataataccaaatatgaagtaactgctaatgttagtgctaataaatttatggcggggcaaacagcaaaagcttctattaaacaagatggagttcaaattcccaaatcggcagttcgtcatgggaaggtatttgttgttgattcagacaatcgagttcgcgagacagatgttagtggccgggcagtcaacagctcttatgttgtgacagacggtgttgatgctggtgatcggattgtgactaaccctaacagtaagttgaaaaataatgcaaaggttgattaatatgatcaagctaaagaacattaataaatattaccgtcaaggtagccaacgttttcatgttctccatgatattaatgttgacattgagcaaggagaattagtagcaattatcggtgaatctgggtcaggaaaatcaaccttgattaatattgtaggctttcttgatgatgattttgagggaacatacttctaccaaaatcacccaatccatgattattcgcgaaagcaattttcaaatttacgaaatcaaaatgtcggtttcgtttttcaaaatttcaaactgctacgtggatcaaccgttgcagataatgttggattacccttgctatatgcaggaaaacgacgtcgtgaaattggcgaacgtgtttctgaagtcttagagcaagttggtttagccggatatgaaagtcaatttcctaaaaatatgtctggtggacaacaacaaagagtatctattgcccgggcaatatcaacgaacccgaaatttttaattgctgacgaaccaacgggagcactcgatacagaaacaagtcaagaaattatgaatctttttaagcgattgaatcatgaagaaggaacaacgattattatggttacccatgatccccatgtcgctgaacaatgtgaccgagtaattaaaattattgatggtcgaattgtaagtgacagtaaaggcggtgaatatcatgcagacaattgagttgatcaaatcagctatccagtcattaaaggcgaataaaaagcggagtttcctaacgattatcggaattatgattggtattgctgcagttattgctatccttggaattggggacgggattacgaaaacgatgtatgataagttcggtaataatgctaagcaaggccagcaaacaaccgaaatcgtctataatcctgataatgttaattcgactgtcaatggattcacgcaggaacaagttgctgatattaatactcaatttggtggtgaaattaaaaaggctgagattgagcaggaatcagataatctttcaacacatgcagatattggtgatgcgactaaatcagtgacattaagcttattaaaggaaccaacccatacggtaaaactgattgcgggtcacaactttggtaaacgaacttttgaactaggggaagctaatgtcctaatgagtgaaaaagtagctaaacggcagtatggttcagcacaaaatgcgcttggcacaactgtaacaattaataatgtcacttataaagttacgggagtatataagacacaggcacaattcactgatgatgggaaccaaaactcatacggagttgatttattattaccgaagaaagtttactatcaaggagatagtgctaaagaaggaaatacgcttaaattaacctttagccagggtgtaaatgccagtgctatttcccgcagagtcgcaaagtacttaaaaaataatagttcagcagcgactcaaggaacctatcagtacctagacatggaaaaagcccttaagcaattctcttctcaaatgagtattattactactttcattagttttattgcggcgatttctcttttcattgccggaattggggtaatgaacatgatgtatatttcagtttctgagcggacgcaagaaatcggaattcacttagctgtgggggccacaccatttaacatcatgatgcaattcttagtggaagcagtaattcttaccatgacaggtggattattaggctttttaggcggcgcaggattggcgcacttactagcaccgcttttatcaagtgcgattggtggtggcggcattcatattcacgcccatatttcacttaatgctttcttgttggcatttggaacatcggcagctgttggtttgatttttgggatcttgccggcacgccaagcagctaataagaatttgatcgatatcttgagataagaaaatcctcagttttttgctgaggattttttacgaattctgcagaatgtaaaaaatatcaaattattgagtataataaaaagataaattaaagtgaaatattaggagataggaaaagatgagtaaaaacaggggtaaattaacggttgtttcattactagttgtaattattgtggtatgtgggggatatatgctattacatccatcctcatcaaagaaagttgctagtgaaaaagctactaagaccgagacaatcacaagcagcagttcatctaaagaacataaagcagctacagaagatagttcagataaagttaaggatgatgattctgatgattcgtcttcagtagctgatactaatgatagtgaggcaacttctgcatctgccacagtaagcagtggtaatcaaacagcccaacctgcacaaagtcaaaatacaacccaagcaacggcggtaagtaattctggtcaaactgctagtcctaaagctaccacgaataactataagggaaactgcagtgtcgccaacacaaataaccggtggacaggaagccgaaagacaacccaagctgcatcaactcaacaacctgtaacagtggaagatgggatgaactttagctaccgggctgcgcaaaaagctggcgtgattgataataatacatctgttgaagagttttacaaaaatgccaaggaaggtaatggctctgtaacctacaacggtcaaactatttactacaaagctaagggtaataatcaatatcaagttacaaccgctaaatagtttgattactaaaaaagtgtccggcattttgtccagacacttttttagtaaaaatactatgaaaaatgtaaaatatactaattgtttgcgctttagtatataatgaatatgtttattaagtgatcattcagtatagaaatatacttaaaggtttggatgttattggagtacttttatgcaaaaactatctattaaacaactaataataattacattgtgcttattagtgctggtggttggctgcatgactattcaccagcgtcgtcattttaataagaacgttaagatcgataatgtggcagttggtggattgactgctaagcaagcattaaagaagttacaagataatccacaatcgccaaaaatttatgttaacaatgaattagtatttaaggataagcaatcagtagcaaagtttagtagtgctgacaaacaaaaaattaaaaatgcattacatagtcagtatactttcttcccatcatctaaggcaaagaacattgcgattaagcctcaaaatgttaatcaagatgaagtatcaaagattgatcaagcagtcagtcaaaaggtaacagaactaaataatggtcgaaaagctcctgttgatgcttacgcggtatacgaaaatggccgagtacaagtaaaaccagcagttggtggtactcaatacagtttagatggtttgcataataaagttgaaaatgaaattgctgggggaacagttcatctgaagccaaaatatacgactccactttctgcaaatagtaaaactgttcagaatgaaaaagcaaagctcgaagaattatcaaaacgaactgtaacataccaagtccaaaacaaaaaatatcaattaaattgtggtgagattattaccagagcaacctatcaaaacggaaaataccactttgacactggagcagctgattcaaagattaatgaaattaataatacccaagcaactcttggcaaatcatttgaattcaaaacccatgatggatcagtgatcaaaacaacagatgctggctcatatgggtggaaaatcagtaagaaacaagctggaaagactcttacgaatgcattggttgcaaataagcaaacagtaaacgccaaaaatgatatctatggtaaaggatataatcaacaaggaactgggtataatactacaagcaacaatggtataggggacacatacgccgaagtttcactagccgaccaacatgcctggttttataaagatggtaagtgtgttcttagtactgatattgttagtgggacgaataataaggataatgaaactcctaagggtgtctggtatatcatgtaccagcaaacaccgtctgtccttcgaggccttaacgatgatggttcgaaatatgcaagtaaggtccaatattggtcaccatttactgatagtggatgtggatttcatgatgcaagctggcgtcatgactggtcaaaacaggcttatcttgctaaaggtggtggatcgcatggatgtatcaacatgcatccagatgttgctggtcaagcctttcatgacttacagaaaaatgagcctgtaattatctactaaaggagaatttattatgcgcccaagtgctgaacgctcaataatgattgcggttatttgtttcatattaacaattattatttcattcgccatgtctgagggatggataaagtagggatttaacgatggatttagaaaagaagaaaaatttggtaattattaatctattttatgtaggattaattttgatttactgtattttacatgcaggaccactgaatttaatggtgtttttgggtatgttagtggttgcaaatttaatggggatgttaattaaataatggtttagaaaatgattgatttaactttaccacaagcattcgtttcgggctttttaaatgtttttgaactaattattatttggtggattatagaatgaagttagccacccagttggtggtaaataaaaaacgccattcggcgtgacatcaggtatcatattaagtgaaccaaacctatatgaaaggatgtccgtcaaatgacgcacttaaatgataccatgtctactagtttattgactactcataaaaagaatgctcatcttactaaagaagaacgtgtgatgattgcgactttaaagtcgcaaggactttccaatcgcgcaattggtcgccaattaggagttaatcatcaaacaattaataacgagctcaaccgtggtacggtccgccaacttcgtcgtcaaaaatctaatggtaagatttacgaatattcttactacatctatagttatgaagctggtcaggccacatatcttgaacatcaccgccattctggtcgtcgtcgcttatattattcttcaaagcaatttttacgattagctgatcagctaatgcttggtgagtttgacgaccaccattactccccacaagcggttatttataaggctcgagatttaatgaatgatggcaccctgatcccaaagtcggttgtaactttatatcaatggattaatgagggtgtgcttcgtacgtccaatttagacctctttgaaaagcctaaacgtaagcatcatcgaactcatccgcaagctaaaaggtgcttaggtcctaatattgctcaacgacctcaaactgcggaccaacggtccgaaattggccattgggaactagatacagttcagggacagaaaaacggtaatgacagtgttgtactagtaatgactgatcgcctttcacgagttaatatcacgagtaaaattgctggtaaaactgcgcatgcagtaaatcagttctttataaatttacgccagaaaatgggcacagatgcttactatcgcatctttaagacaataacctctgacaacggttcagaatttagtgagttaacacaagttcacgatcatgttttctatgctgatccgtattccccttgggaacgtggatccaatgagatcaataaccggtttctccgcaaggagattaccaaaggtgaagctataaataactatagtagtgctcagatcatagcgactaatgattggatgaatcactatccacgagctatgtttaatggacattcgtcaatggatatctatcgtaaggccttctaccaagagatatcacagctccatcaaccaataatcaattggtcagtattatttatttgagtccagtggctaacttattcttgaaatttaggctaattattatttatagactagtgacgggttatttgaacaggaaaattattttagttgatttccttgcaagcttagttattatttgcgttcctgttctagaaggttcattagagtttccattaataatgatatatttatggctgtttgataggaaacatgatcgtcagcaaattatatataataaacccgtggtgctagttaattttttcctagaggaaaatgtctaaacatgttggtaaattaacaaaaaaatcttatttttatggtcttaaaattcatgtgatcgttactaagactggctttccgattacttactcaatcacgaatccaggtgtccatgacgtgaaagtgttagagactttatcggaagaagcgaatcttcccaatatcctaggggacaaaggatatattagccataaaatccatgaaaagcttgcccttaagggcattactatatccgttccgccacgtaaaaacatggataaatcagaaaaactagaccatagcttacttggaaaacaaagaaaaattaggttgtcaaaatttcaactcacattctgttaaagggctagagagtagatttgaaagcatattgctggcttacagtgttctattaagtcgagcacaacgacgttttgaaggaactttgagatattctttaggatattaaaattaactagcaccacgggtgatttatagtatactatgtcaaaaggaggagttaggtgaacaatcaaatcacactagcatatttagatcatgatgatctagatgctttacaagttgtaagtgttgtcagtttttatgaatcgtttatcgatggcgcagatccacttgatatgcaagaatatttacagacacaattgacaactgaaatattggcagtagaattggcacagtcaaccagtaaatttattggtattaaggatcatcaaatactcattggttatatgaaagtcaatgatgaaaaagatgctatagagattcaacggctctatctgctcaaagattatcaaaacaaagggttagggcaacggttactcgatgaagcgaatcgttatgctaaaacgaaacaaaaacgttatttacgtttggctgtttatgaaaaaaatcatgcagctattcgtttttatgaacgttatggatttaaaaaaatcgggatcaaacattttcttttaggaaaacaagatcgtatttgtccgattttagaaaaagaaatctaaaaaaacgtcctcacttttgatgctgaggacgttttttagactggtagtggaaccataattcgctttcttttttgataaaacgctaattccgtcacaccttttgctttggtggctaacttcattctataatccaccattttagatattccggatgcaagcgatgtttatgaaaaaaagtatctgtattttttttacagttattgggatctttgctactatcaagattttatttaaaaagtaaatggctgggaagaattttttctcctcagccattttttcaactaatcaacttttacaaatccatcttgaacaaatttcgttccgtaggtcagagtgttttccacgggacactttgcggcaacgtcagcgaggaacttcttgatgtcttcatcagactcgctgctgcgaagatgtggttggtaacggatctcagtaaacttacgaacattcttaccatcagcaacgtcttcacggccaaggtcaccttcgattgttacccaaaaagctcgtaagtcaaagttacgttttttagctaatgcctgagcagtaattgcttggcaggcaccaaatgacgcaaggagaatttctactggattcatccccgtatttgtactttcaggttcatcaaaggtaatttcaaaaccacgggtacctgctgaaacttgcatccccgttgttgtcttagttgctgttactttatatttactcataaccgtgccctcctttaatacccatagtgtaatcgagacgatacttttggtcaatgagggtgctcaattataaggtgatttcatgtgatgatttttcgccattaaggattgccatcacatcatcaagtgaaatatccaccatatttttgaccgctaaattagtaaagaaggcaatgtgaggcgtaagaataacattatccatttcgtgtaattctttaacaaggggctgatcatcaagcccttgttctcgacgatttgtggccgccaccgtttcttcaccttcaaaagtatcaagggcggcagctgcaattgttcccttttttagggcggcaactaaatcagctgtattaacgactggaccacgactagcattgactaaaccggcagttggtttcatcatttcaaagtcgttagcagtcaataaatctttagaagttggatttaaatcgacgtggagactaacaacatcggcttgctttagtaattcttctttagaaacgaactggacaattccatcgaggtcagtgcgcggattcgtgtcataaccaagaacagtggcacctaatgcatgaagaagctttgccagggttccgccaatgcgtccaacaccaataattccaatcgtggcagtatgaatttccgttgattgttcatcactaaaccagcggaagtcattttcggcgacttggtggtcaaagcggtaagttttccgaagcaaccggaaaatctgcattaatgcaaactcggcgacactccgcggtgaatatgctggtacattggtcacgactaggtcattttcattagcctttttaatgtcgaccatgtcaaatccagctgtccgcgttgcaatctgtttgagcccattggtatggagcttttcataaatatcagccggaactttactacgttgctgaatcacgagtccatcaacatcggcagttaattcaacagcatcgtcaatcaatttcggcgttgtgatgatttcgatattatgttcttttgcgtattcgttaatggcgatttgttcatcgtcccgcacactagtcattaagatttttgtcatgttaatcctccttattaatgaaggctgcaatgttatcaagagctctggttagattttccatactggtggcgtaactgattcggacgtaaccttgaccgccagcaccgaagaaggaaccaggaattacagcaacttttccttcattggcaagatctgtcgcaaatttaaggtcatcattaccatattgttcaggaatcttggcaaatacgtagaaggctccttgaggattaatcagctcgaaccctaatttttggaggttattaacaacaaaatctcgtcgttgctcataggcatctttcatttcttgagtagctgtttttccttcgttagtaccaaatgcggctactgcagcggccattgctggattagaagcagcggttactaacatcgcgtgaatggcactgactgatttcatcaattcttgcggcccagcgataaaaccaatgcggtacccagtcattgcatgtgactttgaggcaccatttaaaattagcgtttgttcggggatgtaattagcgattgaagtatgagtagctccgtaaacaagttccgagtaaatttcatctgcaattacaatcaggttagttgatttaaccgtatcggctaatactttaatttgatcttgggtgtaagtaacaccagttgggttggaggggtagttaagaactagtccctttgcgttaggatgttcttctaggacgctttggagtcttgcgggtgtgagaataaaatcatcgctgcttgtatcaacttcaatcggaatcccaccaagaatctttgtgacagccatgtagaaggggaaagttggggttggaatgataatttcgtcgccaggattaataatggtagaaagagaagcgaaaattccctctgttgcaccaactgtaaccgcaatttcgttttctggatcgtattctagctggtaacgatcttgcataaaatgagcgatggcttggcgtagtgctaaggttccacttcctggagcatagtgtgaatcattggcattgatgctatcgattgcggcctgcttcatcgcggctggtacattaaagtctggttcacctaatgttagtttaatgatgccagggattgagcttacctgataatcaaattcgcggattccaccaggagtgagtttagtgaaattattgttaagacgattaaggatttcttttttagtagctggcatgataaattcctcctatatagtatgtagatttagaaataaaagaagccctgaatgctataggaataacatccaaggcttcttgatcagattggaatgagtataaaagaggctctcggatgtttgggggtcatccgggaacatcacaatgacaaaatcactgctggttagcggacggtaattgcgctaaaccagaagacatacgcttgattcaagtgaattgtcgcagtgatcatcattgtgtcctccttttgattaactgattactaataattctaatcattttttaatttttgtcaagcgttgattgagaaaaactattaattacaaaaatatttattggttacaaatgtaaatataacaaagtttgaaaatgtttgtgattattagttcgcctttagtttgatattaaaattatattctacaattttttttatttttttgtgtcttttttgttgtcttactccacaaatgtgatataatattaatcgtaaaggaagtgagtagcaatgcggatcgacatcaaacattatttggaagttaaccacttgaccatttatcaagtttccaagcgttccggttacggctacacgactttacacaaatcgtttaacaaaccacagtctagttcgacctcgcttaacctgcgtgatcttgatgccttggctcgtgctcaggacaagagcatgtggaaggtccttaaagaactagaagagcattacctcgaatgagattgtggctttgctgtagccacaggaagttaaatgcgttaacttttaacttctagaatacttagactacgaaacttagaaaacaaaatagtatatttaattgaggaggaattgcatatggctcaaaacccaatgaatccatttgacaacgacatgaatgacatcttcaatcaattaatgggtggcatgaatggtttcaattctgataatcggcgttacctaatcaatggtcgtgaagtgacaccagaagaatttgctgaatatcgtagaactggtcaattgccaggcggtgcaaatcctcaacaaggtgggcaacctggccctcaacctaacgcaggtaaggacagtatcttacacaagttaggtcgaaacttaactcaagaagctcgtgaacatgaacttgaccctgttattggtcggaacaaggaaatccaagaaacagctgaaattttaagccggcggacaaagaacaaccctgtattagttggggacgctggtgttggtaagactgctgttgttgaaggattagcacaagcaattgtttccggcgatgtaccagctgctatcaaggacaaggaaattatcagtatcgatatttctggtcttgaagcaggtacccaataccgtggtagctttgaagaaaacatgcaaaagttggttgatgaagtcaagaaggctggaaacatcatcctcttctttgatgaaattcaccaaattatcggtgccggttcaactggtgattctagtggttctaagggtatgtctgacattattaagccagcattatcccgtggtgaactaacagttatcggtgcaactactcaagatgaataccggaacactattatgaaggatgctgcattagcacggcggttcaatgctgttactgttaatgctccaagcaaggctgatactgtagctattcttaaaggtatccgtgacttgtacgaacgtcaccacaatgtaaagttaccagatgacgttctccaagctgctgttgattactctgttcaatacatgccacaacgtgcattacctgacaaggctatcgacttaatcgatatgactgctgctcacttagcagcaaagcatcctgcacgtgatgctaaggcaattgaaaaagatatcgaagcagaagaaaagaagcaaaaagctgctgctaagaaagaagattacaaggctgctcaagatgccaaggaaaagattgctgacttgaagaagcaattgagcgaaaactctaaatctgaaaaggttactgctactccagaagatgttgctaaggctgtagaacaaattactggaattccagtttcaaagattggtgctagtgacgttgaacgtctaaaggacatggacaagcggcttgaaggcaaggttattggccaagacaaagctgttgaagcagttgctcgtgctattcgtcgtaaccgtgctggatttgacgaaggcgattcaccaattggtagtttcctctttgttggacctactggtgttggtaagactgaacttgctaagcaattagcccttgatatgtttggcagcaaagacgatattattcggttagatatgtctgaatactctgaccggacagctgtatctaagatgatcggtgctactgctggttatgttggttatgaagacaacggtaataccttgactgaaaaggttcgtcgtcacccttattcaattattcttcttgatgaaattgaaaaggctaacccacaagttatcaccctcttgcttcaagtacttgatgatggtcgcttaactgatggacaaggtaacactattgactttaagaatactgttatcattgctacatcaaacgccggctactccaacgatgctccagttaagatgggtcggaacgaagatgaagaagacttaattaagaagttgactgcttacttccgtcctgaattcttgaaccggttcaacgccattgttgaattccacagtttgactaaggaagacttgaagcaaatcgttgacttaatgcttgctgaagttaaccggacattagctaagaagggaatgcatgttaaggttactgatgctgcaaagcaataccttattgatgaaggttacgatgaagccatgggtgctcgtcctcttcgtcgggttatcgaacgtgaaatccgtgataaggtaactgattactaccttgaccacctcgatgcaaagaaccttgttgctgaaatgaaggatggccaacttgtaattgttgacgctaaggacgcctcaaaagacgatagtaaagaatatacctcaccatctgaaaaaaaggatgaagaaaaaaacgataagaaggaagaagacaagaagtctgacgaagataagaaagacgaaaagtaattttcctttaatgtagaaaaagacataggatgactctgaaatgagttaacctatgtctctttttgctttaaataataaacattattaatgatctaggcaatcactatggaggctaaaaactaattaggatagttgaaaattgatggtaagatctgattttatgcataaaattattgggattaaggagactctcttttaaaacgaattgcctaaaaatatcgaaaaaatagacaaaaataagtgaaaaaatagtctattttggtgattggcttatcaatccatttattcagacgacaaatatattagcaaattatgattagttaaataatcaatagaccacaagtgctattatatcaacgtttgttcgaattaccagctgttaaataagggctgaatagtgattgtttattaccccactttatctgtatcattctttcacagttgtctctaaataagacatttgggcaaaaatgaaacggtaataatttgtggattttagtgtaaagataaattcgtttagtaacttataattatcgcaggaacagatttgaaaaaatttaaattttttacgggctttttcaaatagttttaaacaacaaaaatgaaatgttgatacatactatttgctaattgcttgattagccattaaatattgatataaaggcatttcaaccatagttgcaaaaatattcgtttgattttcgtttgattaatgaatggctatttcgctaataagtaaagcaacttaacgggtgaatagttaaaatgcaaaatgatcttttcggaaattgcctctcttgtaatccctcaaaaccttgatatagtaggaactgttaagtcattaagcaataaaccttgcatgaataatttattttcttttgaatattttttcataaacgggggtttattaaaatgagaaattcgaatacaaataattggcgttcaactgctctgattgcgggggcaatcttgacagcaggtgtcgttaccaccacttcaacgacagatgtacacgctgataatagtcaaaacaatgcacaagtaagtaatgaccaagttacttacgaccaagttcgagcaactgctgatcagcaacttgcacaattgcaatcagctaatgatagtaaaaaagctcaacaagctacggccaacgagcaatcaaatgctgcggatcttgcacaaaccaacgcacaaattgatcaattaaaagctagtcatgctgctctagaacaagaacaagccggtgctattgcacaagcacaagcttctactgctgcttctattgaagcacaaacttcagctgctaatgctgaataccaacagcaaattaacacacaacaacaaaacgaagccactcaacgtgcagcaaatgatcaacagtacgcacaagctgttagtcaagccgctgaaaatcaacaagctgttgctgatatcgatgcacaatatcaaaaggctttaagtgatgccgctaatacgcagacaagccaagcacaggctgctgccaataattacaactcagctgttgctaaggaaaatgatacttaccaaggtaagctatctgctcaacaagcaactaatgcagaaaatattaaaaatgctgaagcatctcttgcatccgcaactgctaatgctaacaagccatatgaagtcgcaactactaatgatgttgccgttactggtcgagttgctaaaccacaaacagatgttaaagttcctgcttatgtaacaaaatatggaattcatctagaagttcgtggttataatggtgctattcctgtatctgattatacttatcctgaatttgctaatacttactatggtgaataccctgatagtactgtaatcacaaacaaggctgctgaatcaactccacatgatatttcagaaatgccattaaacttccaaccaggtctattaagctatgatgctaaaaatgaccattcagaaaaagtttctgctgatggtttaacggctgaccaagttcaagtattacgggcattagctctttcatgggaaaatggtttccgtaacaatgttttccaaaactaccgtgaattttacaatgtggttaataagaatgatggttttgtaaacgttgctccagttaatttagtaagtactgactttactgataacattgcaaatcaagttgttgctaaccggacaaagtacaatattgataataataaccatactgttatcagcagtggaatgcctgccgaagcaacttatactagcgttattaatgatgcaaccaagaacttgaaaaagaatttaacaagtgaattcaatggtaagacagtttacactgacgttaacgaaaacttaactactacgcaagctggaacgccaacccttcttaattacgctattaatctctacaactcaatgcagggtatgtactatggtgaattagtaaacccaacacacatcggtggacatgcagttaaccttctttgtgctggtgttcgaactgtgggaattggtttccaaaagttgactgatgaaatgactgctaagaatggatcaggtgtttctgatcgcaagaacccatcatatgctgtaacgtttgatcatgtcggatttaacattgatcatgatgctaacttaactaaagaagttcaaaaccgtaatgtatggggtacttcaactgttgatgcgcaattaaatactattaagactgctcaatatcacgttaataaggtgccaggcacaaagacagttacgccaactgctactgatgtgcaaaaagctactgctagcgaacaacaaaaattagctgatgttaaggcacaagcacaacaatcccttgatgcgttagctagtgcccaccaggctagcttaaataagcttgcacaacaatataatgatgcgaaggctcaagtaaaggctaactatgatgttgcagttactaaggcagctagtgttcgtgacgctgcccttaaggctactggagttgttgatcttcaagcttacaaagctcaattagacagtgcctaccaaaacttagtaaaggcagaccaagtagctgctcaaaaacttgctgctgatcgtgacgctaagatcgccaacatcaagaaagctgaaaatgtaaagcttgatgctaagattaatgaacttgttccaagcgttgatccacaaatcaagcaattacaagatcaacaccaagcagttattgctcatggtgatgctgttcttgccgaactaaaggctgaaaataaggctgtttataacaaacttgctgaacaattcaatgttcaattagcagctattcaacggcgtgaaaatgctaagagagctaatgaagttcgtttagcaaataatactgttgtccttccttcagcagtgaaagttgctaatgacggtaatactgatactgttgccttcccaacagcttcaaaccctctacaagctgaaactactggacgtgttcaaactgtttcagcaccatcaattgtaaagacagctacacaaacacctgttgcagttacaccagttgttactacagtaaatcatgctgctgaaaacactgttaagagtaatgaaagttcagctccagttgtaacacaaaccactgcagttaatggtacacaaacatcggttgcttctactgctgataacaaagccactaaagcagacaacagtgagaagtcagttgtaaaagctgatactgttgctaagaagagtgaatcatcacaaaaggttgatcaatcttctatgtcaattgttgctttaactaccactgcattacttggtacacttggtatcacttacagttcaaagaagcgccacaactaatccgaaacgattaataaatacaacaaagaggctgagaatatcccaacctctttgttattttaaactgttattctcttttgtatcctatagcttatcaatcaatggttgcataaaattattattgattcgggtaagcttatgatggtttcctaagtttagttcataggctaatcgctcgggatcattttggtcattaactttaatgattcctcgtttcttaaagttaaaattttcggcaatgtgctgcatcgctttattgctgcggtgagtatcaacccgaaaattcttaattccttgcatttggccaactgttagtaagttagaaaatagcaatttactaagtccttggccccgataattactgctgatagctacccggtggatggtagcataaggctcatctggttgttgccactgtccctgtgtaatgttgcggtaggttggttcgggtgtaagttgaagagtcgcagtagccactactttattatcattaattaatatccagtttgtttgcatcacaatatcttgagtaaaggtttcctgatctggataaccgttttgccattgcggactaccatttttctttagaagctcttttgcatcatcaattattttcataatcgccgttaaatcttgaagctgggcgcgtcgtaaatatatttctgccattattatcctcccctgattaataatatttctattgtacgacatttagccttattcagcggagaaaataagcgagattatatttcagaaagaagtggtttgcgttagaatgaaaagcaatgaaatgaatggaggataagcgatggcattaacatggacaattatttggtggtgtttgctactggttattctcttcaatgaaattgcggccatttatactgttttccgcgaaaagcgggatattgctgcaacttgggcatggttattggtgctaacgctgattcctggttttggctttatattatatgcattctttggacgaaaattaccacataaacaattagcccgaataaaatcccaaacgcaactaaaattaaaacaagcactagaaaggcagaagcaacaattcatcaatatgccgaagcctaaagatcaaaccgtccagatttatcggcggaccatcatgctttttcaaagtattgatgactcatttttaacgcggcacaatgccgttaatatttttacaaatggtaatgcgctttttaagaaaatgtttgatgatattgcagcagcaaaaaagagtgtccatattgagttttatacaatttataatgatcaaattggtaatgaattacggacgttacttgaacaaaaggccgctgagggagtagaagtgcgagttctctacgattcatggggatcgatgggagtctggccaagtttttatgatcatttacgtgaagtcggtggttatgcggccccgttcctgatgtcgcgaagtaacttctttgattttcggataaactaccgtgaccaccggaaaatcgttgttattgatggtgagattgggtatgttggtggttttaatgttggcgatcaatacctaggacgcgtttctaaatttggtccatggcgtgatacccaccttcgaattgtcggtggtggcgtttatggtcttcagcgacggtttatcggcgactggaatgcatcaatgaaaaaggatgaagataagattgtgcattaccatccttactttcaaccaattagagttcatggggacgttgcattgcagactgtctctagtggtcctgaagcgccattggaaaaaattaaaatggggtatttacgtctaattaatgcagcgcaggaccatatttggatccaaactccctatctgatccccgacgatagtatattggatgcgttaaaagtggcagctcattcaggaatcgatgtacggataatgattccttcaatgccagatcatgcttttgtatatcgggcaacgcagtattatgctcgtgagctcgctaatcatggtgtaacaatttattactatcaaaaaggtttccttcatgccaaaacaatgatgattgatggtcggatggcttctgttggatctgctaaccttgactttcggagttttaaattaaacttcgaaattaatgcctttatttacaatcaaaatacggtagacgatcttgagcgaatttttgttaatgatattcgtaactgtcgggtgattacaccagcaatgtttgcagagcaaccacgctggttgaagtttaagcaaacagtgtcacgtctgctgtccccaattttataatgatagaacagagctgtgacattagttaggtcacttccacaaaatacgaacagcgcagtacaacaatggccttcagcgtccggcaaagtcgaacgctgaaggcctattgttgcttgcgggagctcgaaaacgaagtcacgagtgacttctgtctcgctcccgtttttagctaaagaatatatgttcgttttatgataaaattagaggagtaatttaggcgatagaaaggattaaagattatgggaaccctgggatttgttttaggaacagcagcgatggatcatcagcaagtgttgattgatcaattagttgaccagataaagaatgcatctgctgatgagagcttttattatttggtgcctaaccatattaagtttgaaactgaaattaatgtccttgctggtcttcgtgatcgtcaaggatttagcggaagtgacagattcgcctcttcacgcatacaggtactttcgtttagccggcttgcttggtaccttttacgagatactccagcttttcaaaaacaacacctttctaaaatcgggatggcgatgctcacttcccaagttgttcaagaacaggcaagtgagctccgtttatatgcaagcgaagtaaaacaacctggctttattcaaaagatgacagctcagcttgaagaattaaaaaatgctaacataaccgccgatgacttaactgatattatttcccgggtgaagtccgcgaatgacccagcagctaatcaggcgtggcttgctaaaatgcatgatgttgagattatatatcatgcttatgaagatcggctacgggaccggtacattggtaataatgagttatatcggcaattagtgtcttaccttcaaaaatcaccagaagctgctaagatgcacttctttattgaccgttttgctcagtttactgcaaatgagcaacaggtagtggatgcattaattacgaatgccgcatcgacaactatttctttaactcttgatcgtggatatccagatcagaaccatccaaatccccaggaacttcctcctaaaaataacttgttttattcctccgcgatgcaatttcaccgtttgtggaaatttggtcaaatgcatcaaaaagaagtaaaggttttgcaaaatgtagcgtttgcgacgactcctcgtgttggtgcggaattacaacaagttgattcgtattttaagcgttatgcaagcgaaccaattggccacagcgagcgggaagacctttcttgtcccccaaatattcaatttatgacaactaccaatcggatgactgaattgaataatgtggccaccaagattcgccaattagttgctagtggtaaatatcgttatcgtgattttcttattcttagtcgccaccttgacggctatcagacaatgattgaaccagtttttgcggcacataatattccagtttttaatgaccatgaacgcttgatggataaccatccactagtaacacttcttacgacattattagaattaccgcagcggggctatcgaacagcagatatcatccaattgctgaagacatggttacttgttccacggacaggcactggcgatctgatggggctaagtgatttccaagcagctgttttcgccactgagaattggtgccttaagcaggcaattgaaggaaaaagtgcttggacaactaatgatccagaaaagattaagcaattatggcaggcacccggaacgaacctaacagaaccaaaatatgcgcaatcacggttgaaaaaattaaatgaccagttagcccttgtaaaagattttgttgcgaatcacttattgccagttttcgaccagtttaaacaagcacaatcaggccaagaacttgccactgcgttataccagttcttggccgctatgggagttacagaccggttatacgcttggcaacaataccaaagtacccgagatttagaccttgcgcgtcaaccacaacaagtctggactaccttttgccaaattctccaagaatatgtggaaatcttgggccaacaagaactacgggatggaactagtgaggtccttgcagattttagtgaattgctccaggcagggtttgcggctgcccagtattcccagattccggcaacgttagatcaagtggtagtctctgaaacgggaattgtccaaagtgaaaatcgaaaagtagtttttatgattggatcgactgatgatgtgatgccagaaatgcaagaaagcgatagtttgctaactgaccaagataaggatgttttgagtgcttatcttgatgaagatttccaataccttcctggaacggcaattgaccaactgattgatgagccatttgttcactatactggttttatgaacgctaaggaacagttgattttctcggcaccgcaaactgatagtgatgataaggaactcagtatatcgccatatatgcatgatatgtctcgctactttggtcaacctgttcgtgaatatccattagctactagcaaggccggacaagagaatgctattgattttgtaagtgccccactcgcaacaataaaccggttagtcgaagttagccggcaaattcgtgatgagcaaggagttggcattgatcgtcaaccggttatgcccgttggatggcaaacagttgctgaatcgttggttaagttagctaagcaatggcaacaatcagcagatactaaggttcaagcagaaggaatatcactaggtcagcgtctatctttagttgctgcgggctttcattatcaaaacaagattgattccctgggaaataaattggctcaggcactttatctccgaacggcacccgatgatgagcgtggacgggtattatatgcctcaatctcgcagttacaagatttttatattaatcagtacgaatattttcttaagtatggtttacggttgcaaaaacgagatgagttaaccttatctaatgaccgtatcggcaccttcttccataaagcgatggagacttttgttacaacaattcgagaaaataatttgtcatttgcagatcttgcccacgaagataatcagatgcaacgtgaccagctgattgaccatgcattagttacagctcaaaagaatcagccaactttattgcgtctcattaattcttcagcccaagcccaattccaatatcaacaattaaccgcaattgttaaaacaatgttaattacattatgccgccaagctgaatataccggctcacaaccagttaaaaccgaagttcagtttggaagaattggtaaccagcagccgggcaaccttggctctcttgattatcaacttaaagataatcatcatatttatctgcggggacgaattgaccgaatcgataatcttaagcaaggaaacgacaatttcttgacggttgttgactataagtcgagtaatcatctttttgacctcacttcggcttattatgggctctctctccaacttttaacctaccttaatgggttacaggcaaacttagctgaattggaaacgaataattcacgactggcaggggcattatatcttcgtttgaataatccgacaattaaggctgccgagttaaagaagagttccctcgatgatttgaaattaaaagagcaccaatacaagggaatcctcttgaatgatccacaattattgcgggagttagataagagtttagataaacaggcattcttatacccccttaaggaatataagaatggaaaaattaaagctaataaagaagcgcttctcgttacgccgcagcaacttgattggttgcaaaacatgaataaggaacttgtgattaatgcgggtaatcaaattttgagtggtgacttgaaactgaatccttaccggttattaactggaagcaaccgtcgtacaggacttgattacagtgactttttagacgtatttcagtttgataatatgcttgaccagcaaaactaccgcgacctaaatcctaatttagcaaaagaagcatttgataatgtagttcaagacgatgatgaggaggataagaagtaatggctggatttaaaccaacgcctgctcaatccaaggcgataaatgaccgtggcgaaaatatcctagtttcagcttccgcgggatcaggaaaaacggctgtgctagtaaatcggacaattgaattgattaaagaagggcaaagcattgatcgaatgctgctcgtaacatttacggacgccgcagcaaagaatatgcgggataaaatcagggcagccttgcagaaaatagtacaagattcagctaatcccaaagatttacgtgaccggatgagtaatcaaattaaccggcttgcggctgcagatattagtacaattcatgctttttgtttaaagttaataaagcggtactattacttgattaaccttgatccacaatttcggctcttaactgacgaaacagagcggttattacttcaagaagatgtctggcatgaagttagtgaagaactgtataaaaacgctgaagaaaaagttccgggcagagcttcctttagcgaactagtcctcaacttttctagtgaccgtgatgaccaaggactcgacgacttgattttacggttatgtgaaattgctaatgcccaacctgatcccgaaaagtggctccaaaaattaccagataattatgatttagggtctggctcactattagaatctaatttttatcaacaacagctaaagcccctggttatcgaaaagctcaatcagctcattcaagattatcgtgaattagtaacaagagctagtgacaacggtctagatcaagcagccgaagttattaaaagtgatgaagaattgatgcatcaacttctttcttcactcggggggattaccgtcagtgatgtttgtcaaatgatggcgcagcaaaaatttggtagttttcggggacgaccagcggcagatgatccacggattgatgtatttaaagacattcaaaagcagcgtaatcagctaaagaagcagtgggaacaaacagttagtatttacttgggaaagcaggaagcacaggaaccaattgcaaaagaagaattgctaactgagctaacgactttccgtgatcaatttacagccttgttaagcaaagcaactgaaagtcaattagacgctaaaactgttgattcattgcaaaaagaccagcagatgatgcaggagcttttagacttattgcaaccacctacctggaatactattcgggacttatttgctaatgctaaatttgcacgaatgggcggcaaaccgaaagacgatgagctagctgaagaagtatataaatcactgggaagtactcgaacggggataaaaaagcaatttgatcagttggttgatcgcttctttaattatcgtgaagaccaatttcgattaatttcaacgaatgcccaggaacttttacgcgaattgagtgcggtaacgattaatttccgtcgacggtatcaacaaaccaagttaaatcggcatgtccttgagtttagtgacttggaacactacgcgtacgctattttaacgccatcagacgaccagccaaactggcaaaccctcgtcaaagatctgcaaaatcattatcaagaaattatgattgatgaataccaggatacgaaccgccttcaggaaagtattttgatgaaattgacatctcctgaacgcaagaatctatttatggtaggggatgttaagcaatcgatttaccgattccgtgaagctgatccaacattatttcttgggaaatatcaaaactatcgtcaaggtaacgacggggaagcgattgttttaggggaaaatttccggtcgatgactaatgtgacgagctttaccaatatccttttcgaacaactgatggatagggaagttggtgaaattgattatgacgaagatgcccatttaaaatatgcggcaacttattacgaagaaaatcaagataataaggttcacccaacagaagtgttactgtatgacgccaatgctcttgatccagaaaaagaagatgttgaacatgaggatgataaattagctggagaatttcggatgatcgggatgcgaattaagcagatggtcgaaaatcaagagttaatttttcatccagaagatggacagatgcatccaattcagtacggtgatattgttttgcttgagcggacaaaggcaattaataattcattgatggaagagtttaataaacttaatattccattgacagttcacgatgttgaaagttattttcaagctactgaagtgcgagtaatgatgtccttgttgaagataattgataatccacaacaggatattccattagctgctgttttgcgatcgccgattgtcgggttaactaaccaagaattagcttttatccgtcttcagaatcgatctgttgattactacgctgccttgcaatcatttatgggtaattaccagcgaaaggctcttcaccatcaatcgctccttacttctgaacaggtaagtgccctctatgaaaaagcagaccacttcttaggcttgcttcgtgtttttcgacaaacagcccaacagcaaacccttgttgacttgatttggcagatctatgaccaaacaggttatcttgattacgttggagcaatgccaggaggccaccaacgacaggcaaacctccatgccctttatcaacgtgcacactcttatgaacaaagcagttttaagggtctttatcaatttattcgctttattgagaaaatgcaggaacatgataaagatttaggcgtagcaccgacacagttaactgcaaatacggttaatgttatgacgattcacggaagtaagggtctgcaattccctgtggtatttctaattgatgccacacatggctttaacaaaggagcagctcgtgaaaatgcagttgtcgatgctgttgcgggggtaggaattcgttacatggatgatcaacgggtcatttatgacacgccgcaacgacaagcagtgattgaagaaatccagcgcggcgaacgagcagaagatcttcgggttctctatgttgcattgacccgcgcagaacagcggttaattattacgggatcctttaatgaagaaatgcggacacagagtcttgttggttcatggcaacggtggcagaaagcatatcagagtaagaatttactaattggcccgcaaccacggatcactgcaaattcatttatggactgggttggccttgcactagctcgttatccagaattcaacgcgcaacaattgagtcgtggaaatgtcacgctagaaaaaagtactcttgctgatactaaagttactggtttggcggctgatcctcactttattgcaaaaacatataccgcacttgatgttagcgatggattggcaaaaattgggcaaaatgctagtgctaatgtaacggaaaagaacaatacagtcgcaactgatgcttctgaacaaaggattgatcaaattttgcgttatcgttacccccatcttgtcgctactaaaacaactgcttaccaatctgttacagatgtaaaacgagtctttgaagatcctgacacacgtgatatggcgcggtgggattatgatcaacaacaaagggtaaagacgcaagggatttacttaaataataactttgacgttccagctttcattcagcagactactcatgaacccgtggcaacagaaattggaacagcaactcaccttgttttccaaaaacttccgcttgatgaaggtccgattaacgttgaatttgttgatcaagaaattcaaaaattagtaggaaaaaaactgatcaatccagttgtagcagcacggatcaaccggaaaggaatagtggacttttatcagactgaggttggtcaaaagatcttaaagcatcccgcagattatcatcgtgaagtgccgttctcaatgattatgaatggtcatgaattatttaaaggggtaaatgttagtgatgatgaacgcattttaattcacggaatcattgatggttacttaaaaaatgacgagggcattgttctagttgattataaaactgatcaccttaacaaagattatcgcgactttgatttagcacggataaaggatcgctaccgaggacaattagagctctataaagaagctttgaacttaatggaagggattccagttgtccaaatggggctttacctgttagaattaggagagttcgtgttatttacaaaagagggtgattagttggcgacaattaaagatattgcacagaaagcaggggtatcggtttcgactgcttctcgagctttaaaccataatccacgaattagtgaaaaaacacgacaacaaatagcgacgattgctaaagagatgggatatcaaccaaattacaatgcacagaacttaacacggggcgagtcaaacatggtcggaattatttttccagtaaccagtgatactgcgcctgccaatccgtttcatattgacttattacggggaattagcatggcattaaagccgattcactatgaaatggttgtggcaattgcgccaactacgaccgaccttttgcaaagcgtaaaatcgatggtcgaacagtccaaggtgcataactttttagtactttatacggttaaagatgaccccattactaattacctgcgccaaaataaccttaattttgtggtaatcggtcatccagacaaggcccaagatcgctttgtcgacaatgataacgtagcggcagggcaagcggcgactgattatctgatggatcatcaggagactagtcaccccgtctttcttcaatctgcaagtaattgggtatttgaacaggataggcatcaaggttatgagcagagtatgcaaaatcatcaccttcctgctcttagctggcgatattcaccaacggggaccgcagttaaagattttattaaacaacatccgcaaatcgattcaattgtttgtgttgatgacttgttgctggtacgattaatacggcaactacaagaatttaatttaccaactatttgttttaacaatagtcggttgatggggatgttaattaatcaagaagaaaaggttgacttacaaccccgcaaattgggtcaacaagctgttgaattactttttaatccagaagagcaattccgaatcgttgattttaaaataaatagttgatagaaaggaccacggaattacttgtcacggtcctctcttatttttatatggagggaaatcggaatggagaaggtttacattgttgctgctcagcgaacaccaatcggtaagtttaacggtcagttagcttcaaagtctgcagttgaattaggagcgattgcaattaaagcggctgttgaaaaggcaaagctcagcggaaacgatattgaccaagtattaatggggaatgttattcaagcaggaacgggacaaaatccagctcgtcaagcatcaatggccgctggcttaggtgagcaggttccggcaataacgattaatgacgtctgtgcgtcgggaatgtccagtgttaacctggcagcaagtttaattcgcgcaggacaggctaatgtaattgttgctggggggatggaaagtatgtcccaagccccatatgttcttcctaaagcacggaatggttatcggtttgggaacggaaccttacttgatgcaatgcaaagtgatgctttaaatgacgtttatggcggttatccaatgggaattactgctgaaaatatcaatgataagtatcagattactcgtcgccagcaagacgaatttgctttgtcgagccatcaacgtgcagtaaaagctcaaaaagcaggctatttcgattcagaaattgtgcccgttgaagttaagcagaaacgaaccactgtaactgtaaaggttgacgaagcaccacgaccagatacttccctagtggctttagcaaaattaaaaccagcttttaaatctgacggaagtgtgactgcaggaaatgcctcgggaattaatgatgggggagctgctttggttcttgcttctgaaagtgcagtcaatcaattaggattaactccattggctgagtggcaaggatctgcagttgttggtcttgatccagcattgatgggtctgggaccatattatgcaatcaataagctcttaaaaaatcagcagatggcggcggatgacgtggatacttacgaaattaatgaagcgtttgcgacccaagcccttgtctgtcaggacttgcttcatcttgatcctagtgctgtcaatccttggggtggagcaattgcgttaggccatccagttgggtgttcaggcgcgcgaattatcgtcacgatgattaatgaaatgcattgggataatcatgaactcggcattgcttcgctgtgtgtcgggggcggaatgggtgaagcggttctgcttaagaaaatttagtaccaagaataacattcatcgtaaaaggcaagtaattgaggaaaattgaagtttttctctattacttgccttctttattttattaagttaaatacgttttaaataattaactataacaggcctgttttgcgggagctaaacagtaataactttaaattataaaaatccacaaccgttttctaaaaatttgcgcaagcggttgcacaacgattttaaatttgatattattaatattgcaataatgtatgaagcgcttacaataatcataagtgtcttttagaactattttataagttaaggagttgttagcaatgagtcaagaaaagtccacgggggctggattacctactctatcaaagagtactatctggatgatcaactttggattccttggtgttcagacagcttttactctgcagagttctcaaatgagtcggattttccaaactattggtgccgaccctaacaaccttggctggttcttcatcttaccaccattagctggtttgattgttcaaccaatcattggttattattcagaccgtacatgggcaccaaaattaggtggtcggcggttaccatacttactactgggaatgattgtagctgttatcgttatgattttgcttcctaattcaggaagtttcggtttcgggtatggttcgctcgctgccctttggttcggtgcaattactgttgctttacttgacctttcatcaaatgtggcaatgcagccatttaagatgatggttggtgatatggttaacgatgaccaaaagagttatgcctatgggattcaaagtttcttatctaacacaggtgctgtgttagctgccgttttcccattcattttaactgcttggtttggggttcgtaacactgcaaaacgaggcgttgttccagattcagttattatcgccttctacgttggggcagccttgttagttgttactagtttatttacagttttccgggttcatgaatatgacccagcaacttacgcaaagtaccatggtatttctgaagatgataacaaagagggtggaaattggttcacactcttaaagcatgcaccaaaggcattctggacagttacccttgttcaattcttctgctggtttgcattccaatacctctggacatactcagctggggctattgccaaaaacgtttggaatactgttgatgctacctctgctggttatcaggctgctggtaactggtacggtgtacttgcggctattcaatcaatcgctgctgttatttggtcatacgttttagctaaggtgccaaacaagtaccacaagcttggttacggtggtagtttacttcttggtgctcttgggttcatttcagtgttctttgttcatgatcaatggacgttgattgtttcatacacccttgtcggaattgcttgggctgcgatgaacacttacccattaacaattgttacaaacgcattgactggtaagcacatgggtacataccttggattattcaacggttcaatttgtttaccacaaattgttgcttcattattgagttttgctttattcccattatttggacactcacaagttcacatgtttatccttgctggtattgtaatggctcttggtgctctttcagttgccacaatcaaggaaacttatgctgaataggagttatttaataaaataagttaattaagttataataaaggcaggttaaagactacctttatttcagatgaaaggaattgagatttcaatgaaacgtacatttgatattgccccttggcatgttgctactcacaaatgggacccacaagacaagcgtttacaagaatcaatgactagtttagccaatgagaatcttggtatgcgtggcttctttgaagaaggttacagtggtgaccatatggaaggtatttacctcggtggagtttggttccctgacaagactcgtgttggttggtggaagaatggttatcctaagtactttggtaagatgatcaacgctgtcaacttcatgaagttaatcattaaggttaatggtgaacaactcgacttagcaaagcaaacaccaaaagactttaagcttgatcttgacatgaagcgtggtgtcttagaacggtgttttactgttgaaattggtggtactgaaatgtacttcaattttgaacgttttgttagtgttacccaaaaagaattagttggtcaacgtctccacattaagaaccgtggcgacagtgatgctaaggttgaaattactagcatgattgatgctgatgtatacaacgaagacgctaactacgatgaacaattctggaacgttttaggcaagtctgctgatggcgaacatgctgaattaacttctatgactaagaagaatgattttggcactccacaattcatcgttggaatgaagactacttcaaagactaaccttgaccacgtggatgacggcactgacgaaaaacacgcttacaacacatttgctggtactgtagctgctggtaaagaagttaactttgaaaagcgcagtatcgtaatgacttctcgtgattacgactcccaagcagatattgaaaagaacttggatgtattaggcgatcaacttgataatcaaagttttgacgacttactcgatccacatattaaagaatgggcagatcgttgggttaagtctgatgttgaaattgaaggtgacgaaggagctcaacagggtattcgtttcaacctcttccaactcttctctacttattatggtcaagattaccgtcttaacatcagtccaaaaggattcactggtgaaaagtacggtggtgctacttactgggatactgaagcttattgtattccagtttaccttggggttgcaaacccagaagttgcacgtaacttattaatgtaccgttacaagcaattagatggtgcctttgttaacgctaaggaacaaggacttgatggtgcattattcccaatggttaccttcaacggtatcgaatgtcacaacgaatgggaaattacctttgaagaaattcaccgtaacggggacattgcctttgccatttacctttacactaagtacactggcgacaagtcatacgttcttaacgaaggggcagaagttcttactgaaatttctcgtttctgggctgaccgtgttcactactcccaaaacaagaacaagtacatgcttcatgccgtaactggtcctgatgaatacgacaacaacgtaaacaacgactggtacactaaccttctttgtcgctggactcttcaatacacccttgacatcttagaccaagtagatgaaaaggtagctaagaagcttaatgtttcagaagacgaaaagcgtaagtggaagggtattgtagacaacatgtaccttccttacgacaaggaaaaggacatcttcccagaaaacgatggcttcatggacaaggacttgactccagtttctgaaattccaagtgaccaattaccacttaaccaacactggtcatgggataagatcttacgttcaccatacgtaaaacaaggtgacgttatccaaggtctctgggacttcatcgatgactttactaaggaagaaaagaagaacaacttcgacttctacgaacaatttactgttcacgaatcaagtctttctgcttcagtttactcaattatcgctgctgatattggttacgaagacaaggccgttgaattgtatgaacgttcagcacgtcttgaccttgataactacaacaacgatacttctgatggacttcacattacttcaatgactggttcatggcttgatattgttcaaggatttgctggtatgcgtgttcgtgatggtcaattacactatgcaccattcttacctaagaagtgggattcataccaattccgtcaaatgttccgtggccggatcttgaaggttaaggttgacaagcatggtactaagattgatcttgtatcaggtgacccaattaccatcgatcttgacggtaagaagcttgaattaaagtaattcttggaggcatttgagatgaagtttgaagatttgaaaggttttgcatttgaccttgacggtgttattgctgacactgctcgttttcatggtcaagcatggcaccaattagctgacaaggttggaactgaatggactccagaattggctgacgcattaaagggtgttagtcggatggattctttggaattaatcttgaaggctggcggccatgaaaatgactatactcaagaagaaaaagaagctttggcaactgaaaagaatgataactatattaagttagttgaaactctaacacctgctgatattcttccaggaatgaaagacttcttagatgaattgaaagctaacggttaccacattgtattagcttctgcttctaaaaatgcgccaaaggttcttaagtatttgcaattaactgattactttgaaggaatcgttaatccagcaaacttaagccatggtaaaccagatccagaaatttaccaagaagcagctaaattaatggatcttccagctgaccaagtagcaggacttgaagatgcccaagccggaattgaatcaattaaccgtgctggtgaattatcaattggttttggtgctgatttgcaggatgctgatgttaagttcgataagactggtgacgtatccttagctgctattaaagcgcaaatgaattaagatccaatttctctcttttaacaatccgtaaagacgtacttagaataatctaggggcgccttttttatgtgaaattatgaaaagaaaaatcgttataataacaaccatcattctaattagttgcttatgggtagtagttgcaattaactttaatcggccgtcctttcagccagttcaagatgaaacacagtcaagtcaacaaccgcgaccaaaatttaccgaccaacaaattggggttttggcgggattggcaatatctcccgactggttaaaacaaaatattgctgcaaatcaactcgtttatggaattgttaagccctctgataccgttccagcaggagtaaatgattatagctatttagtagccgctgacgaccaagatggaacggcaattttctttaaagttgaaggccagactgtgatcataaaatatacttctcagcgaaatgcaaaattaaaaacaaaggacttaaccttggcgcaactaagaaaagaattctaccaaacgaggtcacaaaaaaagcaagtagataactatgtagcaggattgcggaccgagtaaaatttaaggcatcttaaaaatgctattttcagggtattctttagtgatgagtactgtataatattcaaattaaaggaggaaactgtgatgtcaatttatggcccatatgagcagattttgtcaaatattctttccctcacaactgatcggatcaaagaactaaatcagcaaacagtgcaggataagcaaccaaaactttatgaacatttaattgctcgggtgaagacttccgagagtatggcggaaaaatgccaacgaaaaggctatccggtctctactgaatcggccttacgaaaatgtcgcgatgcagttggaatcagaattgtttgtaactttatcgatgatattgaccgttgcctttgccaattacgtcaagctgactggtgtgaggttattaaggaaaaggattatattacaaatgcaaagccaaatggatatcggagctatcatgtcattattgatgaaaaagttccatatcaagatatcgaaggaaataacccgggacatttttatgttgaaattcagttacgaacgattgcaatggattcatgggcaagtcttgaacatgagatgaaatataaacataatattaaaaatccagagcgaattggtcgcgaacttaaacgttgtgctgaccaattagcatcatgcgacgttcaaatgcaaacaatccggcaattaattaattctagtgaggaaggcgaataagatgcgaatccttgtagcagaagatgaacagcagctatctcatgtattaagttcagcgatgacagcgagtggttatcaagttgatattgctaataatggccaagaagccgttgagcaggcgaaagaaaatgcctatgatgtcataattttagacatcatgatgcctgttaaatctggactggaagcattaaaggaaattagagcaactggtaatcgaacatatattatgatgttaacggctatgggtgaagaagatgataaggtaactggtcttgatgccggtgctgacgattatttaactaagcccttttccttaaaagaactacttgctcgtttgcgctcccgtcaacgccgagatgattcttaccaagtagatgttcttgaatttggtgatttgacccttaacggtaacgatcaatcgcttgaaagccataattcgattagtttaacgaatcgggaaaatcgtttacttcagtattttattttgaatgctaataaagaattatcagcgaatgaacttattaaccacgtttgggatgagaatgaaaccgctgatcaagaagatctctggattaatatctgttatttacggcaaaaattacaggcaattcaatctcaagtaacaattagtggtgaaaaaactggaccgtttatgattgcatgctagggggtcaaggaatgattcaacgttttcgctataaatttattgcaatctcaactgcggcattattatttgtaattttgacaattgttggcagtatttgcaccctcacttactatcaatcgcaccaagaaattgaacgggtattgacgattttggtaaataacgacggccaaattccccgaaaagggatccggactactgacaatagtcaacctcaattttcacgtgagggccttcatcaatatcgttattttgctgtactggttgataataaaaatcaagtaacggaagtgcaagatgatcatattgcaacggttacgccgcaggatgcccgagcaatgacagaccgtcttgtaagaagaaaagtgcatagcgggcagttgctatatcgaggggtaaattatgcttataagattcggaataaaaacggcgagaaagtaattgtctttcttgatgaatcactcctcatggcccggacacgatcactaatgcatacagggttgatcttagggataattgttttagttctgtataccattgttttaaccctttactcgcgtcgtgcaattcggccaattattgaagcagagcagcggcaaaaagaatttataactaatgctagtcatgaattaaaaacgccattgacagttatttcagcgaataatgaaatgcaagagattatcaatggtgagaatgaatggacaacaagcaccaagcaacaggttactcgcctgacaaagttaattaataacctggtgtcacttgcacgcatgcaagaacaaccgacattaacgatgttgccggtaaatgtaagtcaaattgccggggatgtggctagtagtttcaagagtgtgatttcaaccgaacagaaacaattcaatgtacagattgatgaaggcttggtagcaaacgctgatgaaaatacactacgggaactgttgaatattttgcttgataatgcgaataagtattgtgatcctcagggtgaaattgattttacagtgtcctcgtctaatcatagtaaaaatatagttattacgattgcgaatagctataaagatggtaaaagcctggatgctaaaaaattctttaaccgcttttatcgggttgatgaatcgcatactcaaggaaaaaaggcaggctttggtattgggctttcgatggctcaatatatcgttaaacaattcaaagggaaaattacggcgaagtatacaaatggtaagttagcttttatcgtaacgttaaaagaagtaggaaagtaagaatgaaattttggcgacttaagattggaatatatgcagttgtttggagcctaataattggtatgctgacagcggcgtatttaaacttagttaactgggtaattgatttagtttggcatcaatacctagatccggcagttagtagtaaatggtatccgtttttagtatgtattccatggtggattatagaatgaagttagccacccagttggtggtaaataaaaaacgccattcggcgtgacatcaggtatcatattaagtgaaccaaacctatatgaaaggatgtccgtcaaatgacgcacttaaatgataccatgtctactagtttattgactactcataaaaagaatggtatctgtcaagttttcataggtagcctttaaatatacagttttagtgggttagtgccttaaaaagttgtcccattggtctacttgtggccgtgttaatcggaattattccttgtactgctccaattgacggctttgtcggtgcctttcttagaaactctccagttcgaatatgcatttcctgtaataggctggtttgagccactcgaggatgaactgttaattgttctaggattgtatttaaactagcttgcagttcaccattcattcgggcttcaattaaaccaatcatggctttagccccctgcttagtccatgacttgccctgtttcttcatccggtaagtaaaagcccggtgagaactttcgactgaaccaattaaatgaatatccttaaatccacgcatttgtggtgagaggatataccgccaatttcgctgtagatactttcttaaacgcattaggtcgtctgcttgtttttccgttaggttttgtgattcataagtatctaaaattattgttagctctgcttgatcatgatgacgaacggctttaattgctcgcatggctaattcgttgtgccggcctaaagtatgttcaattttctgtaaacaatgatagcggtcgagaaagtattcaccatgtgcaccttgaggaactagacttaatagcttagctggttcgtaacctgggccagcgtcactggccaaaaagatcgtttgaccggcaagcttataatggcggtctaaataatcacttagtcgtgcttcaagccgtccttggtgcccaacactgagaaagtcatgccgattaatgatttgattagctactcgctcataaacccgataatggtgcacaagagtcagctgacctgcttcttttttacctttaatcataaaggcatcaccctcaatagttaaatttttaggcatatggcgaggagtagcttggtgttcttttgcttgagtttgtttagctacctgatttcctaactcatgcacggcgtgcattaccgaatcggcagtaattccgctgtcaaatacaaggttcaaaatgtcggcagtattgcgcattgtagttgtttgggcaatcttagccatcatcattaagtagtgtggcgataaacgacgacgtggtttaatttttaattgttggtctaagtaaaattcacgtttctttgtcccagcctgataataccgtcgttgaaaagtcaccgggccaaagataaaattaagcgtccgtggctgtttattaattacttgatagttcgctggagcttgggactttaagcttcgatctaagctttccaaaaagttttgcatgattacttgtcctaactccaataccccttttaaaataatctgttcagcttcaaataaactgcctgatttcaccaaattctgctcgatttctgttaaaatatccatgaggaaagacctgcctttgcttagtattcgacacactaaaggctactggtcttttctttttttgccaaataagtaaattggtctacaaaaaagatttccacgaccagatgaattattcatccaacctatgaaaatcttacactaacaaagaatgctcatcttactaaagaagaacgtgtgatgattgcgactttaaagtcgcaaggactttccaatcgcgcaattggtcgccaattaggagttaatcatcaaacaattaataacgagctcaaccgtggtacggtccgccaacttcgtcgtcaaaaatctaatggtaagatttacgaatattcttactacatctatagttatgaagccggtcaggccacatatcttgaacatcaccgccattctggtcgtcgtcgcttatattattcttcaaagcaatttttacgattagctgatcagctaatgcttgttgagtttgacgaccaccattactccccacaagcggttatttataaggcccgagatttaatgaatgatggcaccctgatcccaaagtcggttgtaactttatatcaatggattaatgagggtgtgcttcgtacgtccaatttagacctctttgaaaaacctaaacgtaagcatcatcgaactcatccgcaagctaaaaggtgcttagggcctaatattgctcaacgacctcaaactgcggaccaacggtccgaaattggccattgggaactggatacagttcagggacagaaaaatggtaatgacagtgttgtactagtaatgactgatcgcctttcacgagttaatatcacgagtaaaattgctggtaaaactgcgcatgcagtaaatcagttctttacaaatttgcgccagaaaatgggcacagatgcttactatcgcatctttaagacaataacctctgacaacggttcagaatttagtgagttaacacaagttcacgatcatgttttctatgctgatccggattccccttgggaacgtggatccaatgagatcaataaccggtttctccgcaaggagattaccaaaggtgaagctataaataactatagtagtgctcagatcatagcgactaatgattggatgaatcactatccacgagctatatttaatggacattcgtcaatggacatctatcgtaaggccttctaccaagagatatcacagctccaccaaccaataatcaattggtcagtattatttatttgagtccagtggctaacttattcttgaaatttagggtatgtattccattgggatttttgattggtttcttgaatgagcgatggggtaattacccgttaacgattgaacaagtgctgacgcaagtaaggttgaaagggcaattaaattatcataattggtggaagtcttttattcttggcttattggccctcggagcaggagggaacatcgggccggaagcttctacaacagtcttaactagcagcatgattaattggcttggtgaccgtatgcgctgggcaacttcaatgcgccagaaagtttctctttggtacggtaaaatgcaaacgcaagatttagcccgtgctcctagattcagtcagctttttaaaaataaatatcaacgagtctttgttatttcaggattagttggaattggaatagtaggcgcggcgattgtttttaagctttttcctgaagaaggtgtttttgggatgcatcaccggatcattaattgggagtggatcaatttattaacgagtattccaacgattatcattgggattgcttttgggtggctgtttgttcacttagaaaattgggctgcactgataattaatgcaaaaataagtaagatttggcaaggtgggatttttgggttaattttagcgatcagctcgttgattacaagcgatatcttattttctggtgagtttagaattgttccttttacccacgaagccttcaatcattcaatcatcttcctattagttatagcactcgtaaaagccgtaatgagtaatctgggttttgcaatgggatggcggggaggaactattttcccggctatcttttcgagtgtcgcggtaggaactgcctgtgcgatgatgttgcctggagacgtacggataaatgcaattgttgtaatcgcggcaagccttacctttattttagaaaaaccgttattaacaattatcctgctgttattattggtaccgattgaactagcgccggttataattgtagttgcatttttagtaggaaggattattaaactttttcctgctagtgaatagagaatctttaatatcttttgtgtaataaagaagattgagtacttgctaagcgtgaaaaattatttaaatttcgttttattaatattttgttgtttatatgagaaaagtcctgtatctttattaaaaacaattagagaatggggcgataatgtgtttagcagaattggtcaattaatattcgataatgaagctgttgcaaagacttctgattttacaatgggtcttgagattgaaatgcaacgagtagacgaagatggcaacctaagccttgagccatatccgtcagcgattggggatgagaagactaatccatggattaccaatgattttttagaaacaatggctgaaatggtaactccttctgcccaacatgctcttgatgcaatgcattatttgtatgttatcaataatacattgcgatcagctcttgctcccggcgagttattatggccgttatccatgcccccacgacttcctaaagataagactaaattacggttagctaaaatgggaccgaaaaaagaagcttatttgaaggaatgggcaaaacgtcatgggtactcgcaaggaacgccctgtggagcgcatattaatttgagtattgatcagcacattattgagctagtccttaatgctttcccggaacgctttaatagtaagcgtgaagtgcggaattatttatatactatcttggcacaaggttttgtccgatatcgatggcttcttacgtatctttatggtgcaagcccaattgttgaagaaaattattttgaaccgggaaaagagttgcctcatccgattcggagtgtgcggcaaagtcaatacggttttgggaccaaatttaccggtgattttactaatctcgatcgttacattgcacggattgaagaaggagttaaagcagggatcttaacatcggattacgaatttcatggtccggtgaggttcaaaggaaacacggatttaaaaaagttgcctgaacatggaattgagtatttagaattacgaatgctcgatttagatcctagcagttcagtaggagttcgaactggtacactaagatttattcgtttattagcaagttacttgatcatgcagccgccattaaaagaaaacgaagtagaagaaatgttggtgactgccgataaaatgaatgaagttgtagccgaggaaaatccccaagcaacttgtagatatcaggccaaagctcgtgctgtcctcaaaagtttagagcggtatgccaatcaaatccaactcggtccagaatattccgaagttctggaagacttagaagatcgggtcgaaaatccgctaactaccccgagtgctaaactcttaaactatgtaaagaatggttcactcaccgagtatgcgttgcgtcgtgccaaacgttaccaacaagcggcacaggaaacaatccatccttttaaagggtttgaagatggacgaatctatactgctgatgagcttcgaaaagaattaacattgtaaccttttcaaggagaagctagctccagtaagcaataataggcctccaacgttcgattttaccgggcattggaggcctattattctatgtttttttctgaaagtaacttagcttatgtcacagccctccactatttatttagccgcttttttcgctctagtaattaagtcagcaaaaatagcgcgcgaataatcgtaatgtttaaacatgttttctggatgccattgaactgctaaaatttgatcagagttaatggtttccacggcttctggtacctgatcatcagcccatgccgttacatgaagtggttcagcaatctgatttagtgattgatgatgacgtgaattaacatatggtctgggtcctactaagttaaataatcgacttgccttgtctgtattaacgtggtgggaaggaaaatttcctggggcatcttgggaatgcttaagggtttgatggggattttccgaaaggtcttggtataaagtcccgccaagcgcaacatttaatacctgcattccacgacagatccccatcattggttttccagcattaaatgcagctgtagcaagactaatttcaaattgatctcgtttaagatatgtgggacctaatttttgatgcggctcttcgttgaaaaaggttggatcgacatcacttcctccagcaaagataatcccatcaaaaagatcaaggtaggatggtgctagtgaagcagcaacactaggaagaataacgggtaatcctcctgacttgataatggcttcgattaatgggcgaggtgcgaaggcagcatttcgctcgttaatgatgtttgtagcttcagttaatgtatctgcaggaatagcaattcgtggatgcatataacccctcctcatttagttctcatgatattataatcaaagcataattcatttggaatagcaatcaatatttttaataaaaaaagatataatagaagaagaaagaaggaatgtaaagatgcttgaattaactaatattaactcaacgttcaacttaaataatgaggtcaagattccctgtgtgggatatggtacatttaggactccggcagatgtagctgaacaggccgtgaaagaagcaattgaaactggttatcgacacattgatactgcggctgtttacggaaacgaagaagcagtaggcaaggggattaaggattcgggaattaagcgtgaagacctttttgtgactagcaagttatggaatactaatcgtggctatgaacaaacgaagaaggcttttcaagagacgcttgatcgtttgcagatggattatttagacctttacttaattcactggcccgccaatgaaaagcagtttggagatgatgctgccaagattaatgctgaaacgtggcgcgcaatggaagacctttacaatgaaggtaaaattcgggcaattggggtaagcaattttatgcctcaccatattgcggaattaatgaaaacggccaaagtagcgccagcagttgatcaaattgaggttcatccgggttggccacatacggaagaaattaaatacttacaagcacacaatatcttagttgaggcatgggctcctttaggtggtcaaggtgctaaagtattaactaatccaacaatgattcaaatcgctgataagtatcaaaagacgccagcgcaagtctgtttacgttggattctccaacaggggattcttccattaccgaagtctgtccataaagaacggatgataagtaaccaaaatatatttgatttcgaattaactgatgaggatatgcgcaagattaatttattgccaaatcttggcggtcaatgtgctgatccagatgaggttgatttttaacgataaaaaatatgaaattgatgcagtagtattgggtatccagtcaaataaaaatagtatgctaaaaagtctcgaaccttcacggaagaggcttttttgatataatttcttttagctaataatgaggagaatttgaaaatgaaaaatgcttatcgcgcttttcgccaatactcttgccagttcaggaaaaattggcttgaatatttaatattatttggcggtcttgatattttaaaccagtttctggtaattccattttttcgctggataactacctttgtcctgcaggcaggagaaattccgtttatttcatatcaaaatattgtaattattctgacccatcatccattagttgtagtgatccttttaattgaattaatatgcctaatggtaattatctatggcgaatttatgctcttgttgaagagcttttgtggaattggcttgccagagtttagctggcgccgaatgtttaggcaaacaaaagaaactttatcgttactaaattttggatcgttaattctattattaggttactttttacttattattccatttgcggatatcatctttcgaactcccctgctggcgaaaattcaagttcctcagtttattgttgattatcttacccgtaatgcatggcttattggtggattgaccttgttctatcttttgatgacaatgatcggtattcgtttaatattgacaatgccgttaatggcttatcaacatttacggttaagagctgctatgtctcaaagctggcaaatgacaagtaagctaagatggttgaagtttttaattcaaattgtgctgatgacaataattgtaggtagtataacggttgttttttacctcatgatttacattctccaggttgttttggatttattacccgggaaattatctttgattactgctatctttaacttgtcgatcttacagcttggtggggaagtactagcagtatgggcaggaacaattatcttactggtagtcgttaaccccttaactagcattagtgaactagcgacaactcctgaacatccatcacgaggattgctaacttcctttatgcttgtcttccttgtaatcggcttggcgactcttgcaaataatactttttacatgatgggaacggggattaaacgcccaataactatctctcatcggggagttactgaaaaaaacggggtgcaaaatactattccagcaatggaaaaaacaagtaaacttaagcctgattatattgaaatggatttgcatgaaacaaaggatcaccagtttgttgtgatgcacgatgaaaatcttaaagacctaacaggagtaaataaaacacctcatgaactaacattgaagcaattaacacgactaacagcacgcgaaaatggctatcatgctaaggttgcgagttttgatcaatatttagcagcggctgagaaatatcatcagaaacttctgattgagataaaaacaacaccccatgattcaaaacagatgctccagaattttaatcgccggtatgggaaaaggattttgcaagatcatgaccaagttcactcgctcgattacagtgctgtgactaagctaaaaaatattaatccgcggttaacagttttgtatattcaaccctataatttgggtaatccccagggagttgctgacggtttttcgatggaatattcaacattaaatcaggacttcattactcaagcccagtggcaacataaaccggtatatgcatggacggttaatgacaccgatttaatgaaacagactatgtataaccacgctaatgggataattaccgataatttaggggaattaaatgcggcaataaaagattttactggaaagcagagttatgctaatcgaattctaaattatattattgtcgttcctacaagtgggggaattgaaccgtaaaaaaatactcgagaacagataagccgttaaggcgatcagttctcgagtatttttatccaacgtgatgcttcttcaattgcctaataacaattaacgccactattccaccgatcattccttggataaagtttgaacctaaacttaaaaaaccagtaattacatggtacataacggtattgcagataaagtagattgcaatcattacgattgttccgaccaagattgcggtccatttgccccaggtggtgttgccatattttttataaatccagccactgataaatccttctaaaccatgagcggcaaaggaaaataaggcatcttgggggaagccggaaataaggtcaaggaacattccgccaaagccaccaacaattgtccctgctcctggtcctaaaagcatggcagcaatgaatacaccagcatcacataagttgacgttaccatgtgtccatggaatagggataagaaagaagcggccgaggacaagagttaatgctaataacattgcggcaataattgagcggcgtaaccgaaaagtagattccatattaaaactcctaacatagtcaattgtgagtaattttacaataattttcaaaaaatttcagagaaaaaatgtgtcgttatttatctatcgatacaaacaaaaattaacttaacatcttatatcatagtaattacattgaaatattatgtaataaaactgataattgattttcaactgataatcaatattcctattttatatattgattaaatgaaaataatgcgtataataaattgtgaaaatcagaacatgatatgaggtgtgtgttatgaaggttattattgttggttgtacacatgcgggaacaattactgccactcaaattttacagaatcatccagaaacagaagtcacaatttatgaacggaatgataacgtttcattcctctcatgtgggattgcggtttacttgagcggtgatgttggtgatccagatgcgatgttttattcgagccctgaacaacttgctgccatgggtgcaacagttcatatgcaacataatgtaactgatattgaccctaagactaagacagtcacagtgacagaccttgtgacaggcgaaacaaagaccgaccattatgataagttagttgatactactggttcttggccagtaattccaccaattgaaggtgtagatggccctcatgtttatttgtgcaagaattaccatcatgctaaagaattatttaacgttgctaaagatgcgcaacgaattgttgtgattggtggaggttatattggggttgaattagtagaagcttacactcgtcaaaataaggacgttacattgattgatgggtctccacggatgcttcataaatactttgaccgcgagtatacggatcggattcaacaggaatttgtagatcacggcgcccactttgcttttgaccaacgcgtaactggatttgaaaaccacaaaaatggtgtaaccgttaagacggataagggcaactacgaggcagatattgctatcctctgtgttggcttccgtcctaatactgatctcttaaaaggtaaagttaagatgcatgataatggggcaatcattacaaacgaatacatgcaatcatctgatccagatatttacgctgccggagattcaacggctgttcactataacccaactggcaaggatgcatacattccattagctactaacgctattcggcaaggaacaattgttggaacaaatctctttggtaatacaatgcacgatatgggaacccaatctagttctggcttaaacttatatggaacaacgatggtatcatctggcttaactttggagaatgccaaagaagcgggctttgatgcagctgcggtgacagttgaagacaactaccgtccagaatttatgccgacaacaactcctgtattaatgacattggtgtgggataagaagactcggcaaattcttggtggacagtttatgagtaagcatgatgtttctcaatctgctaacattatttccttatgtatccaggataagcacacgattgattatttagcatttgttgatatgcttttccaaccacactttgatcgtccatttaactatgtaaatattcttggccaagcggcggtaaagaaacaagctgaattagaaaaataataactaaaaaggttagaagagaaaaagttttcttctaaccttcttttttacgcttatttttaaaaatcgccgttcatgattgaatcttttacaatcatataatcgaccttccgaatagcttcaaggtcacgaccacccgagtaagagatggatgattgtaagtcttcctgcatttcggttaaagtgtctttgatggagccacggtaaggaacgagcatctgctttccttcaacatttcgataagcacctttttgaacctcagatgcagaaccccaatattgtttgtattgttttccatcaatgttgatgacatgtcctggtgattcgaggtgaccggcaagcattgagccaatcatcaccattgaagcgccaaaacggacagacttagcaatgtccccattatgtctaataccgccgtcagcgatgattggtttccgcgcggctttagcacaccaacgaatagcggataattgccaaccgccagtaccgaaaccagtctttagcttagtgatgcaggctttaccgggaccaaccccaaccttagtagcatccgccccagcattttcaaggtcgcgaacagcttcgggagttgcaacgttccccgcggttacaaaagtgtcgggaagtttttctttgatgtattggatcattttgatcacaaaatcagaatgaccatgggcaacatcaattgtaatatactctggatttaattgttcggattttagttgatcaataaaattatactcatcatccttaatcccgaccgaaatcgaagcaaataatcctttttcgtgcatcattttaacgaaagctgctcgtgtctctggattaaagcggtgcatcacgtaataatagtcattttggacaagccaaattgctaaatcttcatcgatgacgctctccatatttgcaggtacaacagggatcttgaatgtgtgagggccaaacttgacgcttgtatctgcatccttacggcttttgatcacacatttatttgggaccaactgaatatcatcataatcgaatgttttcattagggcagctcctttttaaaaatttaccgtaattattatgcgctaaaatatatgaagcgtcaatgaaaatagcgtacatttgctgagtaatatcaaaaaatagttcgataaactgttgacgacaatgaattaatccggtaaaatagcgaagtaaaaacgttaattttagaaagtataactatgaggtgaaaataaatgtcatcagttgttattgttggtagtcaatggggcgatgaaggaaagggtaagatgaccgattacctaagccaagaagcggacgttgttgttcgttcacaaggtggtaataatgcaggtcacacaattgcatttgatggtaagaagtttgccctccgtctagtgccatctgggatttttgctaaagacaagttagcggtgattggtaatggagtggttattaatccacctgcattattaaaggaattgcattatcttcaagacaacgggattgacatttcaggtttacggatttctagtcgttcacacatcaccttcccataccatattcttcttgataaatgtcaagaagaggcaaagggtgatcacaaggtgggaacgaccaagaatgggatcggtcctacctacatggataaggtttctcgtgttggtatccggatgtgtgacttacttgagaaagacacctttaaggaaaagcttgaacgtaacctcgctgaaaagaacgaattattcactaagttataccatgttgacccaattaactttgacgatatttttgaaagttactacgaatatggtcaagaattaaagcaatacgttactgatacagctcaaattgtcaatgatgcccttgatcaagataagaaggtcctctttgaaggtgcacaaggggttatgcttgatgttgaccaaggaacatatccatacgttactgcttctaacccaattgcggggggagtatgtactggtgttggcgttggtcctaacaagattgaaaccgttgttggaatttgcaaggcttactctacacgggttggtgctggtccattcccaaccgaattaactgatgagattggtgatcaaattcgtgaaacaggtcatgaatacggaacggttacgggtcggccacggcgcgttggttggtttgatagtgtcgcaatgcgtcatgcacggcgggtttcaggaattagttgtcttagccttaacttgcttgatgttttgactggcttgaagactgttaagatctgtacttcatacaaacttgatggtaagcaaattgattactacccagctagtttgaaggaacttgaacgctgtgaaccagtttatgaagaacttccaggatgggatgaagatattactggtgcaaagaagtttgaagacttaccaattaatgcacaaaactacttgaagcgggtaagtgaattatcagaatcaccacttgcaactgtttccgttggtgctgatcggattcaaacgattatcgttaaggatccgtgggaattagcacataaataaatagatgagagcttctaatgtttgaataatctttaagcattggaagctttttatttctcttggctcccctatggtataatcaaggcaaatacacgttataggaggcaagatgatgacacagccaacactaacagtagaaaaacattatttaaattggccacttaaccgtcctttaaatcaagctgacataatgcatgagttgggtgtgcatgcatccgatgaaaatggccaagatttaacgagtaaggtgatgatgaacctaactcaagtggatgttaacaaagtaggagaataccctgtgatgttaaatgtaatggataataacggacaaagtgcccaggcaagcattaccctaaatattcaaccgatgcggacacagaatgcacctaaggaaactgcaacgtccccaaagtcaagacggggatggttatgggttattatcgtaatcgtggttatcttatgtgcatggtgggcgatcagctctcataaccgacaagcggctaatcaagcggcaactgatagtcagcagagcagtcaaataagcaacaattcaagcagtatcagcgatttaacaaaagataatcaacgtcttgctagccaagttgcagaacttaaaggggcaacccaacaatatcagaaagaccatgatcaacaagcattagaaagccgacttgataagatccaaagtcaaatccaagacttgcaaaatcaagttcaaagtaacagcgtgaagcaagatttaaaccaagttaatgaaacagttaatgaagtacgggaaaacccagataatgggacgaaaattgtcaacaatctaaagaataaagacgactttcaagaaatttggggaaatattagccaagaagtccagaagtggttagacgagtttgctaattagtgagtttgacagcgacaagatagacccttaaaatggtaataataattagcgaggttccccgttaaattgttagggaaagactcaagtaaatgctggatccttccttagattagcggagggccttattcttttgaaagattttaaattaattaaggaagtgacatgatggctcatgagatcttagatggctcaagtatgcaacgtgcattgacccggattacttatgagattatcgaacaaaataagggtgtcgataacttagtatttgttggaattaagacgcggggggtatatttagcaaagcgcctcgccaagcgactaaatcagttggaaaatgtagaaattcctgtggcagcacttgacgtctctctttatcgtgatgatcgtcatgtaccagattatactcaagaaccaaccgtaaaaactgatcaattagatattgatattactaataaacatgttattttggttgatgatgtactcttcactggacggacagttcgggcggccttagatgccttaatggatatggggcggccaaaccgaatttcactagcggttcttgtcgatcggggacaccgtgaattaccaattcggccagattttgttggaaagaatatcccaacagcaatgaatgaaactgttcatgtagcagttgaagaatatgatggccatgaagatgtaacaatcgagcataattaaaagggaaacgagacaaaagcccctgtaagcaataaagacctctatcgttcggttttaccgatgatggaggtctttgttatactgcactatttacttcttatgggcgtaacctaatccttttatcttagctttcgccaccaatccaccgttgaatgctcattaaatacccgggtaccaaattttttctgaaaccatcggacttgtttgggcgtaaatccccgaaatactaatggtaattttttccagtgagaataaagagcatagagaagaaggatgtattgttctttactaatatcatctactggaatctcactaaccatggtcatcgaaatacctgttcccagagcagggaatgtatcgagactaattttgtagatgggattattactgatgttagtggtaaatactattaatgcttgtttttgtcgcggacgataaacttcttcaattcgcttattaatcttgtgaacttggcgtttagttggattgagaattatattacgcatatgaaacctctggtcgaacatttgtttagagaacagtatatcatacttagaaacagaataaatcatgtaagtcttttactgatataattttatttattctttccgttgtaattacactattcttattaatgcggtatgattggattagtgagttcagtattaatcgtgcaggacatctaatgcaaaactggtttgcaatttttggaatggtctttggtttcgtgattttaccgttaattttattctggttaacgcgtcgtgagcgagctgaaaatgacgaacgagtaaaataggagaatagaaaaaacgctcaatgactgcacaaatcattgaacgtattattttagggaataatagtagccgatatcgcacattatctgctactagtaaatgttaagtctaattgaggcgaataactaaaaaacaactattggcaccaccctagaagaaagaacaatttaactttgggagtttattaggatttttgtccttattaaaatgagaaaaagttaaggacactttagcagtcattaagtaataaaattgatctcttcacgaattgcttttgatgttaaagcttcaattcgatgatattttaccaagtaatttatcaatagttaatagttttacgagattatgcactcactgtgtacaagtgataccaagaatacactttgttctaacaagggtattattttactatatttttactaatcgtttatattaagataatatagtttggagtttatataggagaaaaaagatggatattcgtaaaattaatatgttaaatggaattaaggaaggatttattactgttttagatactaaaaaattatcagaatgtactactaatgatattgtaaatagcgctgaaattagtaaaaaactttctacaactattaccaaaataaacaagatcttctccatgaaattgaaaatgatctattgggaggtctaaaagaagctctcgtaattgatcgggaggagctaaaagatgtcaagcatttaccaagtgcagacgaaattaaggaattagcagaagtggcatttaatcatacgttggctttttgtaatgaaaataagcatgcgttgtcaaatttgctttcctcaaatggagatatgcagttttatcaaatgattattgaagtagcaaataatgaatttgatgcgcgagttccatatttgtttggggatataaatattaaagaagctaatgtaaaatcgtcattgccattctcatttattaaaaccctctatatcaatacaattgttaatttgttaatgctttggggtgccgcaccagactctttaagcattaatgaaattaagtcaattgcaggcttgattcaaacaaaatcaccagttgaattgattcaaatttataaatcatatttaaactagaaaatgaggagccgaaaattttttctcggtctcctcatttttattatcaaaaattctttttaaattaattgcccttccaataacgtgcccgggtaagcagttcccgtgaacgctggtcagctggtcgataacccttagtaaataggtgtcggaagtacatcatattatagaaaaagccaaagaaaacagaaggccatgggaattggaacagggcattaagtccaaagaaaagggctaccaaagcataatcgagggttaatacaatcattaaaatgaaattatagtaatccgcgcgaaaaagagctggcagtggcccgaaccaaagagttgtccaagaaaagccgactttggcgattcggatatccccctggtcattaacgattttagcgtaatttggtgggagggggagattgtttaagttaaacggattttggttatcattattgttattaccaaatgggttttgcatatctcgtccacttctttctataaataataatattaacacattgagtgagggataggaaacgtctctatcaggctttcaaggaatgttaacaattatatggtaaactcaaagcgataaccatgaaagggggaatcaaggatgctttttttcctaaacgataatattcaacgaaacaaatcaggaattgagcatgcgcaaattaagcgtctgcatctgtttgaaaaatatcatcaaccagctaagattgttacccggcaatattcgaatgaattacacttggtaacagcagaagcagggattgatgatcgtaactttattaacttgtttgattattttcaggaggcttgtgaggtcccgcaaaagaatattcggattaaagatattccggttaacccccattgggagcacaaggctgatgggattaattataattattatcaaaatggcaaacgtattctctatattcgtcggcgcagtgatactgatcggcgggtaattaatattcaatattttgatcattatggaaagcttctcaaagttagttggtttgacagccgcggttttatctcggtcgaacaactttatgactgggatggaaaaatggcaacggaaaactattaccgtccagatggaaccttagcaatccagctagcccaccagcatgataagcggggaagggaaattaaaacttaccatctttttaattaccatggtcgtgattatcaattcagtggctttgaccagttaacccggtttttcctcgatgagttggtcactgacaagcaaatctgtggtgaaggtccggttggctttgtcgttgaccgagtttatgaactaggctgggcagttctgcacatgaagcaccgggtttttcgggttcttcaactgcataatgaccatgttaataatcctgatgatatgcttcattctacccttaattataactatgattggggacttaagcacctccaagattgggatggggtcattgccttaactccgcaacaacaagaagatcttcaagatcggtttggcaagtttggtgtaaagatctaccggattcctggtccgattgttcctgcggcagttattgataagcatcatgttccttttaaaaagcgaacgaaaaaacaagttgtcatggttgctcgcttgtctcccgaaaaacagcaagatcacctattgaaagcatggccacaagtactagccgctgttccagatgccaagctcgatttttggggatacgctaatgatgattttgataagacgctcaataaaattgtcaaagaggaagcgattaatagttctgtgaccttccatgggtatacagataacgtcaattcggtttacgaagatgcgcaattactcattttgccaagtcgggctgaagggttaccactatctttagtggaagctcagtcccatgggttgccgattattgctaatgacataaaatatggtccttcagatgtcgttattgatcaacaggatggattgctgaccaagaacggtgatattgatggacttgctcaagcgatcattcgcttattgcgagatcaagagcaattagcgcagatgagtgaaaatgcttatgctgatagtgagcgttattctgaaccaaacgtgatgaagttatggaatgaattggttgctgacatgaaggaaaagggggaagagtaaagtgtacttttttgtaaaccaatacttattaagtagcaactccagtgttgaacatgctgaattaaaacgactagccctatttaaaaagcatggtggagaagctaaattggtgacccgtgacttcgacctcgttcttcatgataccatcaaaaaatttggtttaactaacgaccaaattgttaatatgtatgacttttttgcaaacacgactgattaccaaggcaaaaagctccatactgaggatttacctttaccaattgactatcaagtaggaactggaaataactatcgcgaagtaaaagatggtgaccgccttgtttgcgaagttcactttgcggctggaacgattgggcaagttaaccatgttgattactttgatcttgctggtaatatgactcttcgccaacaatatgatattcgtggttttaaggcagctgacgaattttttggtgaagatggacaggaatactatgcgcgttattaccgccccaatggagaagcgtatcttgaacggtattttgtaaaatcggttgaaaataccccaattaattcgctgaatgtcttacgtaattatcaggggcaagatcgcttctttgattctttagaagacctctttattttctttttggatgaattgaataaggcaaatggtgaggataatgtgtttattgctgaccgaccagctgttgcgattaaaccggttcaatcaatgatgacaaaagcaaagaaatttttgtggcttccgatgaaccaggttaacgatggtcagaacttaataaatggtcccttaaatccgatgttgcaaggtcctgttactacggatgcggacaagtgggatggtgtaatcgtcatgactgctaaacaagcggagattctccagcaacaaattcacaatgctgtaccaatctatgtaattaatgggacccccgttcttgctaactatgcgcggattaatgaagctgatcggacaccgggtcaattgatttacgttggaagattggcagaagataagcaaactagtcaactaatcaatatgtttgcgcagattcatcagcaagtatctgaaagtaagctaactttctatgggtatggcactggtgaagatatggataactataaaaaacaggttaaaagccttggattagatgggtcaattgagtttgctggttaccagatatcattagatgaggcatatgatcaagctcaattatttgttgatgcaagtcgaatcgatgcacagccattagcgatgggcgaggccttaaaccatggggtaccagttgtttcctatgattacctttatggaccacgtgaaatggtaatttcaggtaaaaatggtgagatcattcctttaaataaccagggacagtttattcaaaccgtcgtcaaattattacaagaccgagatgaactgcaaagcttaagtactggtgcctatgacaatctagatgaattggtagaagaaaaaacttggaagcaatggcaacaactatcagctatttagtcaaaattggttataatatattcagaagacgaaaagcagaaaataatcaaatgtttttgaagcctttggtcgttatcctttgataatctaaagacggaaaatgagggcggaatgatggataattatcaagcaatgaatttttactatggacttcttaatttgcgtgccggtttttttaaggctgacttatgcgaaatactaatggcgatcgcacagagcgtacctgataaaaatcaacaatcagcaacggcataccatactgtagaagagaatttgagccaagaccataagcaattaaatcgtgatcaagttgcatttgggtcattttatgaagatggtcatattttacataatgtcaaaattaatacccaatcagactttttcctcgatccgacccgggaagatactgtcaagtggcatgttagttttacggttgctaaaaatgtccgtccggccgatcaatttattgttcaactatcgccaaatttgatggttgcgcctaatggtcatcctgaaaagccaattcctgattttagtgatcaaaatgggactgttattgcaatgggagcttatgaccaggataagcacgaacttgtctatgcttttaccaattacgtaaccgagcatcgacaaataattggtgaattagagggagaattagcagttgatcctctaacgactccagagaacgaatttggcttggaatgttttataagtgttgatgattaccgaaaagactttacgattgatatcgactatccagatcttgctaacgacatgtttctcgggatttctagccggatgatgcattttgataaggatcagcagctttttgaggacattatctatgttaatccagcacaaaaagaccttaatcatgcctatattgtctttaatacgagtgatctagtggaagaattatctaatgccatcgtcaaaccgtcaacaatgcggattgagatttatcgtaattcacggggattaaaattacctcaatcatatggggtaaactttcagcgactaagggatattactaatcgattcccggtagtggaaggcgatcaccttgtcgagacaccttatacaatgtcctttgctgataacaagatgcgattgaattttggcgccgatcacacgaatgattcctatattattagggtaattggccaatataatggtgaacttgatggaacagtacgattgcgggctcgtttatttgggatggaccagcaaaatgtttatatgagtaattctactgctgcaacagctgctggaacttcaatgatcgcaagggggcatgctatttctaaggagaagttagcggaggagacagcggacacaacagaagatttgaagcaagacgaacattttgtcaatgtggaagaacctcttgaatctacagcagttgaagaagtgcgagaagaagctgatattccatctgcttctgatggtcaagaacaatttcctagttctcaagcggaagaagatgaaacgccaatcgaagaaaagcaggcggaagctcctgcagttagtggagcagtcggcggggatgaattatcaatctcctttgacgtcactcctcaaacggcaccggcagaggttatagaagaagctgaatcttcagatgacaaagaggagcttactatatctgaagaatccgcagtgtctgagtctgctgttgaaattaaagttagtgaagaggagacaagcgcagcacccctaccaatgccgggacgacgaccaccgcgccggcacagtcgttttcaaaatacaatccggtcgaatcattcgttgcgtcatttgcggagattctaatagaaaaaataaagtgtcaggagagattatcctggcattttatttttaccgaaatgtaatcgcttacataaaatgcttgcaattaaaaataaaggtgttaacatttaattgaagccaagtaaacgtttacattaatggataaagggaaaagtgtagtagttttatggagagaggttttattttatggaaaataatcattggtggaataaatcagttgtttatcaaatttatccaaaaagttttcaagataccaatcatgatggtgtcggtgaccttcgtggaataattgatcgtctcgattacattaaggaattaggcgtcgatgtcatttggttgaaccccatttataagtcaccacaagttgataatggttatgatatcagcaactatgaagcaattaacccgactcttggcaacatggatgattttcaagaattgatcgattgcgttcatgaacgtggaatgaaattggtcatggacttagtagttaaccatacttctgaccaacatgactggtttaaggaatcacgaaagggcaaagacaatccatatcgtgattattatatttggcgtgacggtaagaagggtgaagagccaaataattggggttcctacttctctggcgctgcttggaaatatgatgatgaatccggccaatattaccttcatctttttgctccagaacaaccagacctaaattgggaaaatccgaaagttcggcactctgtttatgacatgatgaactggtgggctgccaagggtgtcgatggttttcggatggacgttattaacctaatttctaagccggatggattgcctgatgctaacaagaacgaagacgagaaatacgccaatgttgaaccgttagtatcaaatggtcatcgcattcatgaattcttacaagaaatgaataagaatgttatgagtaagcataagatggtgacagttggtgaaacaccgggcgctacaccggaagatgccgagaagtatgccagtcttgataataaagaattaaatatgattttccaatttgaacatatgggccttgatagtaatcctaatccagcccttggcaagtgggatgatcgcaagacgacccttaaagacttacgggcaaacttaacgaagtggcaagaaaaattgtatggtaaggcatggaattcactttattggaacaaccatgatcagccacgcgttgtatcacgttttggtaatgatcagacggaagattaccgggttaaatctgccaagatgttagcgactatgacccacatgatgcaaggaacaccatatatctatgaaggggaagaaattggcatgactaacgcctatttcccaaagcttgaagattacgtcgaccttgaatcgattaatgcctatcaccaacttgttgatgaccaacatttacttgatggcaagacaatgatgaagtacattgcgatccattcacgtgataatgcgcggacaccaatgcaatgggatgatagcgaatatgcaggattttccgaccataccccatggaaaaaggttaatccaaattataagcagattaatgtcaaaaacgcattagctgataagaattcgattttctattactatcaaaagttgattgaactacgacacacgatgccagtaattactaatggaaagtatgcattagttcctggtaatgaagatgatgaacaggtctttgcatatactcggcaagatgatgacactactttgttggtaatcttgaactatactgatgagactgttaaccgccattataatgtgccagctgatgcgaagttactaattagcaattatgaggatgatcaaaatggcactatccggccatacgaagctaaggtttatcaatactagagtggggatgaataatcatggataaatcacgttcgaattcgaaacaaaaagttgaaacgaagcaggttgatctggatacagggatgccagatttgccaaagaaagagctatttgcgattacatttgcttttctgggaataaacatggctttctcactgcagagttcccagatgagtcggatttgtcaaacgattggggcaaatcctaacaatctaggtttcttcttcatttttccaccattgatggggatgattgtacaaccgattatgggaaagatgtcagatcggacatggaatcgctttggtcgtcggttgccctacctattatttgggactccaattgcggcattagttttgatcatgctaccgttctccggttcacttggcttcggctatggttcaatggctgcgatgatttatgctgcggcagcggtatgtttgatggatttatttagtaatatttgtatgcagccatcacggatgattgttggtgacatggttaataacaagcagaagaactttgcttggtcatggcaacaggtcttttctaatggtgggggaattttagcaacgatcttaccatttatctttacgatgttcggaatgtccaatactgcaaaacgaggggtagtgccaaataccgttatctggtcatacctttgtgcagcggcggttctcctgtttactggactatggacggtctttaatgttaaggaatatgatccggaaacatatgcaaaataccaccacattgatcccgaagaacaaaataagtcagtcagcctttggaaattaatcaagacggcaccgcgcgctttctgggaaatcaacttggttcaattgtttagctggtttgcgatcatgtacgtttggacatacacgactggaacctgtgctcgtaatatttggcatacgtctgatgttacttctgctggttatcaagctgccggtaactggtatgggattttaactgctgtttatagtattgctggtattgtttggggattaatttatgcccatgccaaggctggctcacggaagaggtggtacacatttgggatgatcgtcggtggtttagggttagtctggatgacctttgtcacaactaagactacttcaatcattgcaatgatcatgtttggaattggtaacttcagtatcaacacgattccatttaccctcctcacttcatctttaaacggtaaaaacgaaggtgcctacctcggactcttcaacgttggaatctgtgtaccgcaaattgttgcatcgttatgtagcttcttcctcttcccacttgttggtcacaatcaaccaatgatgcttttgcttggtggcatctccctccttattggggctttagctgtccaagcaattcatgaaggggtaactgttaaagaagtgtagcgctaattaaatctctccttaatataaaatagttaaaataaaagcgggactggaaatttatccggtctcgcttttgcaatctatttaattgtgatggcttccaaagattgatcttctttaacgtgcagcaacgcattgactgtatcaagtgaagtcatgaggggaacattttgcgcgattgtactttggcggatctgaaagccaagtgaatcttgttcataatcatggcgcatagtgttgataacaagatcgatttgcccggcttttaagagtcggttgagttcatcaatgttagatattttttgatggacgtgaatgccgttatccttaaagtgcgatgctgtttgtggggtagtgaaaatttggtagccaatctgagcgaaccgttttgctagtgggagaatgtcttcttcatccccattttcaatcgtaaagagaattttgccattgttagggacttgaacgtgtgctccagaaaaggctttatgaagtgctttttcataggtggtatctgtccccatcacttcgcctgtcgatttcatttctggactgagataagaatcaacgttcgctaacttgttaaaactaaagacaggagctttaacatgaatggtttgtggttctggataaagaccgttagtaaaaccttgatcagcaagtgactggccaaggataactctggtagcaacttgggccatttcgattcccgtaatcttgctgaggaatggcactgttcgactagctcgcggattaacttcaaggatgtacacttcacgattatgaacaataaattggatgttcatgatgccaatacatttaagagcaactgctaatttttcggtagcagtaacgatttgttgtttaatgtcatcatcaaaatgttgtgggggataaactgccattgaatctcccgagtgaacgcccgcatgttcaatatgttccataattccagggataaggacgtcttttccatcgcaaattgcgtctacttcacattcccgtccttcaaggtaggcatcgattaaaatagggtgatcagcagtaatggaggcgttttgttgaaggtattgttgcagttcttcttgattataaacagtctccatggccttaccaccgagaacataacttggacgaacaagaacgggatagccgatttttttagccgctttgataacggcagagtgagtagttgcggttaaaccgattggctgcttaagatttagatcagtgataactttatcgaatacttctcgatcttcagcagcatcaaggtcgtcaacggttgttccaagaatattaaccccatttttagcaataccttctgctaaattaatcgctgtttgtccaccaaattgcacgatcacgcctactggttgttcgagatcaatcacgtttaggacatcttcaagcgtgaggggctcgaaatagagtttatctgagaccgagaaatctgtcgaaacagtttctggatttgaattgatgacaattgcttcataaccagcccgttgaattgccttaacgctatgaacggtcgcatagtcaaactcaactccttgaccgatccggattggccctgaaccaaggacaaggatagatggcttctttgtccgttggctttcattttcatggtcatatgcgctgtagaaataaggggttgaagaagtaaattcagcagcacaggtatcgatcatcttatatacggggagaatttcattctgttttcggaatttccgaacttcttgtggggaagtatgccaaaggcgggcaattgttacatcgctaaagccatattttttgctgattatcagtgtttctgcatcaaatggcttggtactaagatcgtcttcaagttccaccaagtgtttgacgatatcgaggaaatagggggaaatcttagttaagtcatgagtttgcttaagggaatatccacgccgaaatgcttctgctaaataaaataaccgatcatcttggggataacgtaacttcttttcaagcatatctgttggcgcatgatgagcttctgctgaaaagaggtctttttcatcaatttcgagtgaacgaacagccttatggagagcttcctcaactgtccgaccaattgccattacttctcccgtggctttcatctggctgcccaggtgtcgatcagcctgagtaaacttatcaaacggccagcggggaattttgcagacaacatagtcaagtgccggttcaaattcagcaaaagttgtcttggtaacgggattcttaatttcatcgagggtaaggccaaccgcaattttagcagccattttagcgattggataaccggttgccttggaagcaagggcagatgaacgggaaacccgcggattaacttcgataacgttatactggaaactttgcggatcaagagctagttggacgttacatcccccttcgattttgagggcacggatcagcttgagcgcgcaatcacggagcatctgatattcgcagtcgctaagggtctgattaggggcaaatacaatggagtcaccggtatgaattcccactgggtcaaagttttccatacaacaaacgaccattacattgtcagctgaatcccgcattacttcaaactcgatttccttataacccgcgattgacttttcaattaaacattgggtgacaggggataattccaagccattcttggcaacagtacgcatttctgcatcattatggcagatcccgccacctgtaccacccatagtaaaggcgggacggacgattactggatatccgcattggtgtgcgaattcgactgcttcatcaacagtattaactgtctgtgaagccggaacaggttcaccaagctcattcattaattccttgaatttttcacggtcttctgcttcatcaatcgaatccagcttagttccgagaagttcaattcctaattcgtcgaggagaccagttttagataaggagacagctaagttgaggccgatttgtccgccaagggttggtaaaattgcatcaggatattcttgacggataattcgagagagggagtcaaccgttaatggttcgatgtagacatgatcagcaatttccttatcagtcatgattgttgctggattagaattaacaaggatggtttcgtatccttcttcgcggagggcaagacaagcctgcgtgccggaataatcaaattcagctgcttggccaataataatagggccagatccgatgacgagaattttatgaatatcagttcgtttaggcataggtgagggcctccttattactgtcaattaatgccatgaatttatcaaaaagctgttcagcatcgtggggtcctggcgcagcgtctggatggaactgaacggaaaatgcaggatactttgaatgctggagtccttcaactgtgccatcgttcacttcaaggtgggtgatttggaggtcagtatcatcaatggaggatggatcaaccgcaaaaccgtgattttgagaggtaaatgcgatttttcctgttttaagattacggacaggatggttaaaaccgcggtgaccaaatttcatcttataagttttagcaccattagctagggcaaagatttgatggcccatgcaaatgccgaaaatgggcacatgtttttctaattctgcgacagtttccgcaatagttgtcatttcaagtggatcaccagggccgttcgaaaggaggatgccgtctggattgaacgccattatttcactgatcgaggcgttataaggaaggacaattgcattgcagtttcttttatttaattcacggagaatgctatttttcattccgaagtcaagaacaactacagttcgcttagttcccggattagcgtaggattctttagtagatactttgctaataatgttctgggttggcgaagtttgttttaactgttcaagcttatctttgatatcggtaacattatcggtcataattccgcgcaatgttccatattgacgaagcttacggactagttcacgtgtatcaattccttggaggccaggaatgtggtgctttgctaagaaattagggagcgagtcagtcatgcgccagttgctgggaacacgagcgacatgatgacaaattatgcccttgatttggggatacaatgtttcgttatcttcactattaatcccatagttaccgatgagaggattggtaaagactaaaatctgattggcaaatgattgatcggtaattgcttcttgatagccgaccatccctgttgtgaagacaacctcaccaagagttgccttggtagcgccaaaaccctcgccggtatagacagtaccatcttctagaattaaatatcgtttcatgagtttcatcctttcttgcaaaacccttccactgatcacataaactagttgcacgttgtaaaaaagtttaataaaaaacgcttaaaccattggtaatgggcttaagcgtatacgaaaaattgaatatatatgtataattcaatgttagtaatacaacgctgcccttgttagcctcacgggaccaaattaaaggataatgattgatactaaactactgtaattttatgcttttgtcaagtcactaatgaatttttatgcaaaaacatgtttattataaacaaaaaactgcataaaggattttaggtattataacaaattttatttaaaataaaagtaaagtctgcaaattttgtctgcaaactctacttttttagaataattaggcttggtaagtttccttgataaagagaactgaaattgcacctaagagagcagaaataccggtaacaagcatcatgttgacttgggaactaccaagtaatgggaagagaccaaaactaagtagtgaggcaaccatttgtggtacacagattgaaccattaaataggccaaggtaagtacccatgtgtttaccagataaggcatttgtaaccattgttaatgggtaggtgttcattgaagcccaagcaattccgatcaaaacgaaggagaagataagggcgttttgtgaatggataaagaagattgatgtgtatccaacagccccaagcaaaagactgaaagcatagccagctttgtggtggttattaggaactttagccagaacatatgaccatacaactgctgcaattgattgaacagcggtcataacaccgtaccagttaccggcagcttggtaggcagcagaagaagcatccgttgttaaccaaacattcttagcgatggccccgaccgcataagttgaaaggtattggaaagagaaccagcagaagaattgaactaatgcgacattccaaaatactcgtggagcatgctttaagagggtaaaccagtttccaccttttttattgtcttcctctgaaataccatggtaacgagcataagttgcgggatcatattcgtgaacccggaagatagtaaagagacaggtgatgactaaaataacagcgccaacgtagaacgaaattacaactgattgaggaacaacaccctttttagcagtgtttgatataccccaccatgtcaaaaggaatgggaaaatggctgctaaaacggcaccggtattacagattaaactttgaatcccgtatgcataactcttttgatcatcgttaaccatatcaccaaccatcatcttaaatggctgcatcgccatatttgatgaaagatcaaggaaggcgacggtaatagccccaaaccagagggctgctaacgaaccgtatccaaatccaaaacttcctgaattaggcagtaaaatcataacgatgacggcaatgaccatcccgattaacaggtaggggagacgccgaccaccaagttttggcgcccatgttcggtcagaataataaccaatgattggctgcacgatcaatcctgcaagtggcggaagtaagaagaaccatcccaaattattaggattagcaccaattgtttggaagatccggctcatttgtgaaccttgtaacgtaaaggcgatttgaaccccaaggaaaccaaagttaatcatccagatggtactctttggtaaaattggcaatccactcgtcgaagtttcttggtcttggttaagtacgacagactcatcttgactcatgaaaaacaactcctaacgaaaaaatgtataaaataattgcaattcgagcttgtgtaagctcttacacgaataatataacaaacttatttcatttgtgcaaccgcttgcaaaaaagaatagtaaaaagtcgtgatctgtttcaataaaaagatcacgactttttaatgctctaatgtttcttgcctaggagtcttacgctatttcgcggtgtgatatggattggaataaattgtgagtcatcatcgttcaataggctcctaactgcgatgagtcccatttgataaaagtcctgagttacgcttgtaatagttgggatggtaatatcacagagaaaagtcccatcgatactaataaatgataggtcttttggaatatcaaggcctagcaaatgagcctctctgatcatgcccacagccaccatatcactagctgtgatgatcgcgtcaagattcttattcattagtgttttgagcatattttgctgaggaccaaaactgtaatccccatattcgacccatcccatatgagggattaatccgtgttcagtcattgcccgttggtagccttgaagtcgttgcttaccggttgaagaacgatcgatgccggctaatccaatccgtgagtgtcctcgttcaattaaatagttagcggctgaataaccaatttcctcgttatttgaacttgtaaatttaaatccaatatatcgggaatcagtttcgtcatagaccgatactaaccgacaaggggtattgctttcttgtaaggtgcgagctgcttgttcgtcgagggaggttgcgactagcagaatgccggcaacatgccgttcgagggcaacgctaattgcttgattaagcagtcgggcgttatggtttccagcgtaaagaataaacatttggtaaccagctttatctgtttctgcttgaatagcagcgatgatatcatttgagaaattcgtttgagtattatttaagataacggcaattaacatactactattggcagctaattcagccgctgcaaggtttttcttgtatcctagttctttagcgattgtttcaatcttagccgcggtttcgggacggtaggatttcgcctttttggataaaacacgagaaacagtggccgttgaaacgtgggcccgttgagcaatatctttaattgttggcttcatagacggacttcctttattgttttcttattaaacctattataatgaaattgcgattttttgtaaacgctttcaatgggggcttaatcattatttaaaacaaaaataggccgaaagaaaaattcttccagcctacatagctattctttatttccgtttcgtaatgataatttcacgactgcctcacagcgtgctgtttggggcatcatgtcaattggttgaatgtagtcaacgtgatagacactagttaaccgccgtaaattacgggcaagagaagccataccacatgagacgtaggcaaactttcgcggcttaacttttaagatttgcttgattaattggtcatctaacccggttcgcggaggatcaacaacaagggcatcaaagttgagtccttctttttgccagcggggaagaacttcttctgctttgccgacttcatatttagcgttagtaatattatttagcttggcattttcgttagcatcagccaccgcttcggggatgatttccattccgcaaacagattttacccgcgatgcaagtgaaaggccgattgtcccgatcccggcatatgcatcaattaaggtatcatctttgtccaattcaagggctttagaagcttcttcgtacagcacttctgtttgttcaggatttagttgtaagaatgaacgtgctgagagtttgaaatcgagtcccatcaagctttcaaggattgaatcttttccagcgaggtggatcattttatcaccccaaattaagggtgtatcacctgggttaacgttttgcataactgaaacaactgctggtagttctttttcaatgcgttcaagcaattcgcgtttgtgaggaagtttagcagaattagtaatgaaggttaattggacttccccagttgaccatgattcacggactgctaaggttttgatgataccgctattgttcttttcatcataaactgggatttgcaagtcttcgatcatcttcgtaactgctcgaactgtctccattgtacggggcatttgaacagcacaagtctccatatcaacgagggtatgactgtttggctggtaaagaccggctgctactttgccattgaccattcggatttgaaactgggccttgttacggtaaccgtattcttcaggggctgcaatagttgggcgaacatcgtaattacggtagccgtatggttgaaacttttcgagactatcgatgattacttgccgtttaaactttaattgttgttggtaagcgaggttttcaagttcaaaaccaccagcgatatcagcgtactcatctcgtggcgttacccgatcccgactctttttccggatccggtgaattttagcttcaagatagcgtgggagaacgcgtgtaacttccgcgactacgacttcatttggcagggcaccagggacaaaacataccttgtgcttatagtagccgattccgtgcccgttaacgcctaggcgacgaattgtgagggggaatcgtttcccaacccatacatcaacatcttgttcatgttgtttagtttgtgtcatattatttctccgttctattaattcaatgtgttgactattttagcacatctccaaataccactggacaaatatgtcagagatgaaaaatcgcgtaattaattttcggaatgataacttagccaaacttatagtcaattattatggaaatagtcaattaagtgtgcatattactaataatatgttttttgaatgagtaaaattatagtagaataacaatgtgaaatgttgcataaataacttaaaggaagtgacacgtttgaaaattgctgcaattgccgggtcaaatgctaatcattcatacaaccggatgttattagaatttattgcccgtcattttagtgatgatgatattgatgtgattgatattcgtcaagtgccaatgtttaatgaaaattataagggaaagattcctgaggctgttgctgatattgatcgtcgtgtttcaagcgccgatgctgttatcattgccagcccagaatacaaccactctgttacctctgctttaaagtgtgtaattgaatggctttcctatgaagttcatccattagaaaataagccagtcatgatcatcggtgcttctacccatgaccaaggctcatcccgttctcaagttcaattacgagatattttaatctcaccaggtgttaatgcttatattttccaaaacgaagagttctttatgagtgatgccgctaatatcattgataaagatggtgacattactaacgaaacgactattcatttcttagaaaaatgtatgcgtgaattcaaacactacgccaaggcaatcaatcgtatggttgctgaaaagaaggaggcgaagaagtaatgaaaatccttgctttagttggaactaatgccaatttctcatataaccggattttgcttaaatacatgaaaaagcacttccgtcaaatggctgatattgaaattgctgaaattagccaattgccaccatttagcgttgatacccctctttctgaacaaacagaggtatggaagttaaagcaaaaagttaaggctgcagacggagttattttctcaactcctgaatatgaccatgggattccagcagccttaaagagtacagtagaatggctttcttacaagactgatgtattaaaacgcaagccagttatggttgtcggtgtatcttatggacgccaagcttctgcaagatctcaagttcaaatgcggcagattctggtttctcctgattgtgatgctaacctattaccaggaaatgaagttctgattggtaatgctagtcattccttctccaaagacggtcggttaattaatgccgaagcacgtgataaccttgaaaactgctttacccattttgtggaatacattcaaatctttgaaaatgcaaataaggagggactggatatgtccgttaaacaaccaacgatcagtgaagcttacattaatttccctactggtcggttgacattaaaagaagttcaacaaatcttcagtacaatcccatttgaaattgacttaattgacagtactgaccatttcgcatggttctctgacaagccaaatcgggaacacgttcggaatgtagcttctctcggggaaactgttcaagaatgtcatccaccgttggctgttccggttgttatgaagattattaacagtttccggaatggtgaaaaagacgttgttacccgtccattatggatgaatggtcaccgttcattgattcaatactacgctttacgtgatgttaatggtcattaccttggaaccatcgaatttactggtagtgtggaatacattcttaacctcttcgaaaatggtgcatggagtactgatggtaacactggtgcatctaagcatgaggatgctaatgacaacagtgaagaagctgacagcgttgatgcatcaactggtgcttcagaatcaagtgatgatgataacaccgacaatgctagtgaagtggttacaaccccagcaccagcaacaaacgatgatactgatgcggacgctacaacaggcgtatcagatgcaggcagcgtagacgcaaatgatgatgaggcagatgctacaacaggtgcatccgaaaactagttatgaataatgaattgatggcgcagcggcatgtgatgactcatcacgctctcggaactcgcataaatttaacgatttttggcaacaaatacttttcattgttaaagaaatcaatggacctaattgaccactatgaggaccgattaacggttaaccgtaatgaatcagaagtgatgtcggtgaaccatggtgcagggaaaactccgaaaatggtatcgccaacgacttttgacctcattgagctggcagtgaaatatagtcgtgaaaactttggctttaacgctttgattggcccgttagtaaaattatggaaaatcggttttgcaggggcgcacgtgccaagtgatgctgagatcaaagagcggttgaagttgatcgacccttataaagtattgctgaaccgagaagcacggacggtatatttagaagagccggggatggaattagaccttggcggaattgcgaagggctatattgcggaccgtattcgggatctttggattgaagctggagttcccgcgggaattatcgacttaggggggaatctcttatttgttggtaagtcgccacggcgggatgatgggcagtggatcatcggtgtgcaggatccgcaactgcatcgaggtgaaaatttggcaactgtccgcgaaccggcttgttcggcagttacatctgggatttatgaacgatttttgatcaaaaatggtcgtcgttatcaccatttactagatcctcggactggatacccattagagactgatttgagcagtgtgactgttttcactgatcaatcggtaatgggtgaaattgaggctaagcgactcttcttcaatggtgaaccaatcacaggctgggaagtgcgtcctggtaaccgtggcgctatctttattcataatgatgaatcaatggtaaacgttgggctgaataaaaattgatttcatttaagcgtaggtaaacgaaatgtttacctacgcttttttgttaatgcctttagacctggttgagtgcgcgagcagagcgagtgcacgaaacaaaaaaacacctgctatgcgggtgggcgataaaaattatataaaaaaggcctcttttgccttaagatgtaggtgttcaagccaaagccaataagggaaaagaggttatataaatatggctaataaattaaatagcttagcccatacgaagtggttatgtaagtatcacatcgtattcataccaaagtatagacgtaaagcgatcttcaatcaataccgaacccgagagattatattcgtttattgtgcaaatataagagagtagaaataattgaaggtcatatgatgccagatcatgtgcacttgttagtaagtattccgccgaagctaagtgtctcgtagtttatgggatacttaaaagggaaaagtgcattaatgatgtttgatcgacatgcaaacttaaaatacaaatatgggaaccgacattttttggctgaaggctactatgtgattacagttggattaaatgaatccacgataaagaagtatatccgagatcaagagaaacgtgatatatcaatggataagctaacaagtgtggaatattcggacccttttaagggtaagtgaggtagtacaaacaccgcttaaagcggtggcaaagtagtcagagcattttggcttgagcaaagcgaaagccagcgccttgagacgccggcttttattatcggcttatagccgatgtgcaaaccacccgtttgacgggtggttatgatttgtgtgcgcctggcatggatattagctaggcggtgaaagtccgctatgggccgtagtagtcggaaccatgagctgatgacaagggtgttcattgtgaagtagaatctgaaggaagtctaaggcaaagtactgcaccgatgaataagaagtagctataaggctgaaggtaactggataaggttgcacaacaagctgaagtccaatactactcgaagttactctcagtaaagctaacggtgacatggtacgaaagttaatgttcttacccggggaggcctgacttacacgcttccgacaagaggaataagataaatttccacagaagcaagcggtagcccaagtattaacgcccatctttgagcagattttctcggatagtagctttggatttcgcccacatcgtggcgcccaagacgcaatagcgaaggtagttgatctttataatcatggttacaaacgtgttgttgacctagacttaaaagcctactttgacaacgtaaaccacgatttactgatgaaatacctccagcaatacattagtgaccgatggatattgagactaattcgtaagtttcttccgagcggagttctagatcatgggctttttgcgtgaagtgaaaaaggagcaccgcaaggtggaccgctctctccactattggcaaatatttatctaaatgagttggataaggaattgaccagacgtggtcaccaatttgtacgctatgcggacgactgtaaaagccaacgagcaggggaacgagtgatgcaaagcattacgcagttcctagaaagacgattaaaggtcaaagtaaatccagataaaagtaaagttggtagccctttaggcttctcattaggtgtaaaccagaatggtgcttacgcgcgaccagctaaagaatcacaaaggcgagttaaacacgcgttaaagcaattaaccaaacgtaatcgaggagtctcaattactagaatatttggggaaattcagcgaaaaatgtgtggatggctccaatactattcaattggtaaaataacagcgtttattcaacgattagactaatggttaaggacacgcatccgacaatacatctggaaacagtggaagaaatttaaaacaaaagtcactaacttaaagaagttaggcatgtcataccacgacgcgtataaattcgctagtacccgcaagggatactgacaaaccgcgcatagtaagacactaacttactctcttgaaaatgaaaaactggaacaactcggactaatgaatatgtccaagatgctctagtcaattcaatgtgattaagttgtcgaaccgccgtatacggaaccgtacgtacggtggtgtgagaggtcgataattgaactagtcaattatctcctactcgatttgacagattgataatgatcgaacgataaagaaaggcagaggagattggtacatatgatcattatttcatttataaaaagtgaataaaaaagagggtatgctgctttaatcttcctcaacggttgatataatagcattgaatgttaaattttctgatgataaatcagttgaaaaaaactgttaagagtgtagaatgacaattgaaagttattactaaaatgttgatattaaaagatggcgattaatcatcatttaattatcagctttttaataaaatgaagttttttaaattgctagtttagccacttgtttaataaaagattggttgtaacttgccagcaggtatcaccattcatctgatcgacagctacagatgaaatgccacctggtagtgatctttatggttgctatttatctcaaggagtactttaccttttatttataaaatggtttattgaatgacttaacttactccaaaagatagtggtaagtagtgccaggtggcttgggataatttcccttaaaactggcggatataggctattatgataacctaaaagaggcgacccccgatgcctatttaggctaattataatagtagctgtcgcttgactggatagtggtaaagccaagttattaagtgttaagcaacaatttttgtgcattgtttgttgcgactactactccctaatagatataaggtttatagccttatatagtaggtatcataaatggttgaacgctgtttagataaatttgtcaaacggtagaatgataatgcttataagaacccccgaatacttaactttaagcatgagtagcaatatctcccccagataacttaaaagtcttattgtctacgccaacagcaataagcagataacagtttagttttatcatataagtgtatttgctactaaaagttttttactgttcatgacaattgtgctaaacaacgattcaacagtacacctagtactagtgatacctgaaaagtcggcacagaaattacaacagtatggtaaatgtgctagcctactgtagtaagccgcttggtggtaggttttaaatgttgaatggtggatttatcaccaaagttagttgtgcgtaaactaaccaaaaattcaattgataaattaggaaaagtgtaataagataattgcaaaatagaaaacacgaatgcattttaagtaggttgttcagagaagcagcggatggtgagagctgtcgaccgaaactccggtgcaaaaatatgtgggcaggtaattctgcacggatagtagccgttatctacttcgaagggtgactaaagatagtcaaacttgggtggtaccgcggaactagagccatttcgtcccaaaatataaaggatggaatggctcttttttatataattaggaggaaatacgatgttagatattaaaaagattcgtcaagaacctgatttttataaggaaaagttagctacgcgtggtgtaaaaccagaagaaattgatgaagttattgcgttagataaaaagcgacgggaattgctccaacaaactgaaacaatgaaggcgcaacgtaatgaagcatcaaagaagattggagaagctaagcgtaatggtgaatctgccgatgctgccattaaggaaactcgtgaacttggtgataagatcaaggaattggacgctgaacttgaagtaaataatgctgaactccatgataagatggctcatcttccgaatgttcctcacgatggtgttccagttagtttaacggaagacggtgccgttgaattacggagagtgggtaaggttcgcgactttgattttgagcctaagcatcactgggatattggtgaaaatcttggtattttagactttgatcgcgctggtaaggtttctggtgcgcgttttgtctactacttagggcttggtgctcagcttgaacgagcagtttacaacttcatgcttgatgaacacatgaaggaaggatataccgaagtcttaccaccatatatcgtcaatgctgattcaatgtacggtactggtcaattccctaagttcaaagaaggagtttaccaagttaacggtgaggatatgactttgattccaactgctgaagttccattgactaattactaccgtggcgaagttatcccaactgaagaattaccagtttacgttactgctttaacaccatcattccgttctgaagcgggagcagcgggtcgtgatacccgaggattgatccggatgcaccaattcaataaggtagaaatggttaaatacactaagccagagaactcatgggatgaacttgaaaagatgacggctaacgctgaaaatatcttgaagaagttaaacttgccataccatgttattaccttaactactggtgacatgagctttactgcatctgaaacccatgatcttgaattgtggatgccagcacaaaataagtatcgtgaagtttcaagttgttcaaactgcttggacttccaggcacggcggatgcacacacaataccgggatgaaaatggtaagttacaatatgttcacacacttaacggttctggtttagccgttggtcggacagttgcagctatcttggaaaactatcaaaacgctgatggttccgtaacgattccagaagtattggtaccatacatgcatggtgttactaagattactaaggaaaatgcggttcctttccgtaataaagttaataaataagatatatagaagacagtttttaaaaagaagttcggattgctaaatctgagcttctttttttgattaaaaaaatctaagaaaaagtgaaaaataaataaattatacttaataaaattaacttatcgctggtcgctctctttaaaaattattgtttaaaacgctaacatcttggataaacacaaactttgatgaagaatatttattttgttttctagcgatgataaagtagtatcaacgttaaaatttgattaaaaaggagtcggtgcagatgcatagcagcaagataaaaaatatgatcatcaccattgttgcagttcttggaattgtagtggggtggcaaatggtcgagcctcagcaggtatctgctgccgaaccgacttatacgtttgcaactaataacacctttgaaccctttgaaattcaagatagtaaaggtgggtactcaggaaagaatcctgggattgaaattgaaatgcttaagaaaattgctaagcatgagcattttaagtatgaactgaagtcaatgagctttaatggtgacttacaagctcttgaagcaggacaagttgatgcagtaattgccggaatgagcgttactgatgaacgaaaagaaaagtatgatttttcaacaccttactatactagtggggttgttatggctgttgcaaaagatagcaatattaagtcgatgagccaattaaaaggcaaaacagtttcagctaagtcaggaacgagtgcggcattatttttgaagaacaaccaaaagaaatatggttacaaaattcgctactttgattcctcaaatacgatgtggaacgatgtgaagactgggaatacagcagctacttttgatgatggccctgttcttgaatacggaattaaagaaggtgtcccacttaaggttgtgacaaagaagccaattgatgcgcaaccagttgccgttggatatcaaaagggcaagaacttagaattacagaaaaaaatgaatgatgggatcaaatggctaaaagatactggtcaaatggatcaaatcattgataaatatactaagagtgacaaaacaacgaaggacagtgcgactgatcggacaatcctgggattaatccgcgccaattatcctgccttgcttcgtggattatggatgacaattgaattaaccgttgtcggcattatttttgcgatgatttttggggtaattttaggtgtattaggtattgcacaaaacaaatttgccaatgctgtttctagtaccctgatttatatcttccgtggtattccaatgattgttttagccttctttatttacatggggattccaaatgttattggccataaagttccattattcttggcaggaatcttaaccttgacttttaacgaaggggcctatattggagccattgttaaaggtggatttgaatccgttaatattggacagtgggaagcagcgcggagcttagggttgccatatagcaaagccttgattaaggttattgctccccaaggatttaagttaatgattccttcgttagttaaccagtttattattaccttgaaagatacttcaattctttccgcaatcggtgtaatggaacttacacaaacggggactgttatcatttcccagaacatggaaggatttaagatgtggttaattattgggacgatgtatatcattatcattaccctgttgacttggttatcaaactacgtacaaaagaggatggcttaatatggataaaaactataaagtacaagtaaaaaatctgcacaaaagttatggaagtaatgaagtgctgaagggtattagcttggacgtaaaacccaatgaggtggtttgcatgattgggccatcaggatcgggtaaaagtacctttcttcgttgcattaataagcttgaagaaccaaatagcggccatatttatattgatggctacgatattgctgatccgcaagtaaatattaataaggttcgggaaaatatcgggatggtttttcagcactttaatctctttccaaatatgaatgttttggagaatatcactttggcacctattcaacttggcaagatgaccaaggaagaggcagaaaaggacgcgatgcactatcttgacttagttgggctggctgataaagcgggggcagatccaaccaagctgtctggaggtcaaaagcaacgggtagccatcgcccgtgcccttgcaatgaaaccggatgtaatgctctttgatgaaccaacgagtgcccttgaccctgaaatggtaggggatgttttggaagtaatgaaacggttagcgcaagaaggaatgaccatgatcgtggtaactcacgaaatgggatttgctaagcaagttgctgatcgggtggttttcttccataatggtgatattcgggaacaaggcaccccagaagagatttttgataatccacaacatccagatacgaagaatttcttggataaagtgctaaatatttaattatcgactgacttttagtaatttaaatttgacaaagctagaataatcattataataatgagtaacttctaataattggttgacagagaatctagcatttgctgaaagctggatccaattaaatggcatgagcgtttgaaatggagtagtttccttatcaaccgagaggtagtttgcaaatgtgagctataaagatgggtggaaccgcgttaaaaaacgtccctggtagatgattaccagggacgtttttatttgtttaagaaaacgtttttgttattaactaaatttttaaggaggcatattatggacgaaaaacaacaacagaagttagaacgatcgcttaaaagtcgtcatgtgacgatgattgctattggtggagctattgggaccggtctttttcttggatcaggaacagccattcaccaagcaggtccatcaatcattctttcatacctgatcgtcggtatcttttgcttctttatgatgcgggcgttaggggaacttattttagctgatacttcaaaacattcatttattgattcggttaaggaatatcttggtgaccgaatggaatttgttgctggatggatgtactgggcatgctggctaacattagcaatggcagatcttactgctactggtatttacttgaaatattggttccctaatttaccacaatgggttggtccattaattattgttattttattgatgttagtaaacatggtaaacgttgggctgtttggtgaactagaaagttggttctctatgattaaggtgattgcaattttagccttaatagcagttggcgcggtcttacttgtgatgcatggtcatgttgaaggacggccggtaactctttcaaacctagttaaccaggggggctttttctctactggtccgatgggcttcttaatgtctttccaaatggtagtttttgcctttgtgggaattgaaatggtcggtttgacagctggagaaactaagaatccagataaagatattccgaaggcgattaataccttaccagtccggattggtttattctatatcggatcaatgattgcgatgatgtcaatttacccatggttccatattaagactacttctagcccgtttgttcaagtgtttgcagcaatcggtgttccaggagcagctgcgattttaaactttgtggttttgacagctgcaatgtctgcaactaacagtgcgatctttagtactagtcgttccctctactcattagctcgaagcgggaacgcaccaaaacgttttggtgaattaagcgcgaaggcagttcctaatcatgcattaactttctcttcattgattctttttatcacagttatcttgaattatattatgccagcgggaatattcgatgtgattgctggaatttcaacaattacctttatttttacgtggatcattattttggttgcacatattaagttccgacaacaaaatcctaagggagttgcaaacttcagaatgccaggatatccgattactagttggttaacaattattttcttcttggcagttctagtgattttactctttattgattcaacacgaattccattaatcctttcaatcgtaatttttgcattgcttgcttatggttatggatttttgaagaagaaaaattaaaaacttggcagagactcgaaaattttgagtctcttttcttttgcatttgataatgaatagtttaagagagagctaaaaagtaatagaaaagaaggttttgtttaatagttggaggagatctaaatcccggtgtgacgcggtttaattgtatttttgttggggagggattatactgaaagtgtggaaagatagaaggccgaatttaacaaacatcttcttataataaaactactttgaagtacgttaattagactttttgcataaaaataccaacaccccactccacatgaaacgctttagtttccgtaaaaagtatgttagctaaaagtaattagtggctatatctacaacgaacctataatgataagcttaagttcctcgtattaagcagatagataagttaccaaaaattaaaaataataatactcggcctttcttcccacttcttcatggttgagaagcccggaatgttattttgataaacgtcccgggcttctgccagtttaacccctaaatattttatgttatttcctgggaaatactaaagttagtgaaactgtaaattacttctctaaatatttgaacatttgctcaattgattttaattgagtataatagagaaacttggcagaggcgacggaaagacacatagcaaagacgattcgccacgtgtaactttccgtttctttttactaacatatgataacgttttcatgagttctgaaaaaactttgtgaaattttaaaaagctgaaaagttaataaaataaatgaattgtaaaattataatttaaaaaatgataaaaattcacaaatcgtctacaaaacagcgctttacaggaaggaaatttaaagatattcttaagtagttaactcgccacaactgcaattatattatcttaatttggaacggctgttaacgaatattctatttaaggagggtacacagccatgtctatgtatcttattatcaacattattgggttgattgtctttcttggaattggatggcttttctccaagaatcgaaaggaaatcaactggaagactgtaggaatcatggtagtattgaacttacttttagcatggttcctagtaagttcagcagctggtcgtgctggggttaaagcggccgctgatggttttgcttggattgttaacgtctctgcaaaaggaactgtgtttgcattaggtgattggtatacaccaaagaaccttaacttcatttgttctgcattgatgccaatccttatgattgttccattgttcgatatcttaaactatattggtgtattaccatggattattaagtggatcggacgtggactttcattcattactggtgaacctaagtttgaatcattctttgccgtagaaatgatgttcttaggtaacaccgaagttttggctatttctggtatgcaattacgtgccatgaacaaggaacgtaatttgacgattgccatgatgtcaatgtcttgtgttactgcttcaattcttggtgcatatattgaaatgatgccaggacaatatattctgactgctgttccaattaacattattaactcattgattgctgtaagtatgttaaaccctgttaaggttccagctgaagatgacaccatcgaaaaggttggtgctgaagttgactctgataagcgtgaaccattcttcagtttcttgggagactcaattttaggtgctggtaagttaatccttatcatcattgctaacgttgttgcctttgttgctttggcagccttgatcgatgctatcttagcattattctggaaggacctttcacttgaaagtatcttaggtgttatcatgttcccattctcatggttacttggtttacctgttcaccaagcatggatgctttcccaagatatgggtatgaaattgattactaacgaattcgttgttatgggtaaagttactggtgaaatcaacagttacgcacctcacttgcgggctgtcttgactgtcttcgtaacttcatttgccaacttcggtactttaggtatgattattggtgccttcaagggattagttgacaaagaaaacaacgattacatcgcttcaaacattggttacttaatgctttctggtattttggtttcattattatcagctgcatttgttggtctctttgtttggtagaaatgaaaaagcagctgggaaggctgcttttttcaacattaaattcgaaaacgcttgcacgataaaaaggagataaaattatgactacaaagattattatggatactgatccaggtattgatgacgcagctgctttaacaatggctattaatgacccatcattagacttgaaattagttactacagttgccggtaacgttactgctgataagacgactgctaacgccttgaagattattcacttctttggtaaggatattccagttgccgcgggtgccaagcaaccattgattaagccttttgaagatgctgctcgaattcatggtgaatcgggaatgcctggttatgatttcggtgacgactatggtaagccacttgataagactgctgttgaagcgcttcatgacgcaatcatggctgaagatgaagtcattctggtgccaactggttcatacactaacattgcattactctttagcgaatacccagaagtaaagagtcatattaagcaaatcgttgcgatgggtggttcgttctccggtggtaacatgaccagtgctgccgaatttaacgtcttcaccgacccagacgctgctaaaattatgtacaatgcaggtgttccaattgtaactgttggattggatgttaccttaaaggcgctcttgactgctgatacaattgaaaaactcggtagccttaataagactggtgaaatgttgcatggattaattacgcactataatgatggtaatgatcaaggtcgtccaatgcacgatgttaatactatcttctaccttcttcatccagaagcatttactacaaaggatatgtgggttgatattcaaacggatggtccggccatcggtgctactgttggtgacattcgtgctgcttatcatgatggtaagaccaacgcaaaagtttgcttagacattgatgctgaatacttcaataagtggttcttagaagaagtaagcaaaatgaaataagatactgggagctgagagcttgctttcggctctttttattactttcttgtgtaaacgcttcacagtataataacagtagttaaagtaaggaggaaatgcaaaatgaagaatattatgattgctggcgctggtgtattaggtagtcagattgcatatcaaacggctttatctggctttaatgttagtgtatataaccaccatattgataccgctgaacgacggattaaggcgttgaaaagtgattatgaacgtgacttgcatttgactgataaggaatttcaacagggccttgataatattaaagttattaccgatgatattgcgactgcagttaaagatgctgatttaatgattgaagctttaccagaatcgttagagttaaaggaacagttttacgaagaggtttcaggattagcccctgaaaaaacaatctttgctagcaactcctctacatttatccctagccaactagctccttatactgatcggccagaaaaatttcttaatatgcactttgctaaccaaatttggaaatttaatgtggtcgaaattatgggcacctcccaaacaagtccagaggtgattgaagaagctacaaagtttgcccgggaaataaagatggttcctgttattcttaataaagaacaacacgggtatattctgaattcccttttgattccgttacttgcatctggtcttagcttatgggctaaaggagttgctgatccagcgatgattgataaggattggatgatttcgacaggtgcaccaatgggaccatttggcattttagatatggttggtttacggacggcagcgcaaattgaacggaatgcctatgcccagactaaggatgaaagtcataaggaaattgccgataagatggaacagatgattcaagaagggcacgaaggaaaagaatcgggacaaggattttacaattatcccaatccagctttcatggatccagattttctgaagcattaagattataagtattgaaaacttagaaaagggagcaagataaaagtcactcgtgactgctatcttactcccttattttgcgctccaattttcacgtaatccggttgcaacaatggcaaaattacggtacagtagtagaagacgtgaaacaaaaaatgtttcacgaaaggagacctaataaatgaatcctgaacaatttcaacaagcattagctgatcatggtatcaccttatcagcagaacaaatgcaacaatttgctgactattatcaattattagttgaaactaatgaacatgtaaatttgacacgaattactgaaaaggatgaagtgtatttaaagcatttttatgactcaattacaggagcgtttgctgaaccacgcttagagagtgaagaactgacattatgtgatatcggtgctggtgccggctttccttccttaccgttgaagatcgcttttccgcaattaaaggtaacaattgttgattcgttaaataagcggattgcttttcttgaagccttagttgccaaactcggtttaaccgatgttactttgattcatgatcgagcagagacttttagtgccaagaacagtccatatcgggagaaattcgatattgttactgcccgtgcagttgcccgcctatcagttttaagcgaattatgcttgcctgccgctaaaattagcggggaattcattgcttataaggcaagtgcagctccggaagaacttcaacaaggtggggcagcaattaaacagcttggtggaaaagttcaaaaaacggtgacattgactttactggaaactgatgaagaacgtaatattattgtgattgataagataaaggcgacccctaataaatacccacgtcgtccaggattaccaagcaaaaaaccaattcaataagataaggagttgaaagtatggctttttcattatttggcattggaaaaaataattccgataatacaaaaaataaggtcgtagaagtaaaaattgatcaaattattcctaatcgttaccagccacggaaagtatttgatcaagacggtatccgtgaattagcacaaacaattgacgaacatgggttgttacaaccaattgttttacgtgaatacgaaccagcaaaatatgagattattgctggggaacgtcgataccgggcgatgaagctcttgaagtgggaaaaagcgccagcaataattgaaaagatgagtgatcaagagacggcttcacttgccctcattgaaaatctgcaacggtcgcaattgagtccagtcgaagaagcgcaggcctaccgacaattaatggatctgaaccatcttacccaatcgcaattagcaaagggaatggggaagagtcagtcctttgttgctaacaaattacggttgctgcgtctgatcaccccagtccaaacagctattttagatcaccggattacggaacgtcatggtcgagcattattagatttagatgaaaaacaacaacgtgatatgttaatgcggattgttaatgaacggttaacagttcggcagacagaagatgaagttgctcgcttattagggcgtccgttaccttcagaaattgcagaattaaaagcagccgctaagcgcaaagaattagcttctattgaggatcatgctgaagaaacagcagacgttgaagaggtaccagtagaaaagcctgcagaaaagaggcgctctcctaaacgaaagacagctaagaaggcccgaagcaaaaaaactcagcaggctaatgatgcgcgtttagctttaaatacgattaaaaagtcaattaagctggcgacaaatgaaggctttgaaattaaaatgcatgagaaggaaaacggcgatacttatcaattaacaattgagattccgaagaaacagtagggaggccaaaaaatgggttctgtaattgcccttgcaaatcaaaaaggcggtgttggtaaaacaacaacgagtgttaatttgggtgcatgcttagctgagactggccagcgcgtcttattaattgatcttgatcctcaaggaaatgcaacgagtggtttgggcgttgaaaaacagaatattaagcaaagtatttatgatgttttaattaatgaagtgccattagaggatgttattcaaaagacaagtcacgagggagttgacattgctccaacgacgattgccttatctggagctgaagtagaattaactaatttaatggcccgagaaacacggcttaaggattcttttggggaaattcgtcaaaaatatgattttattttaatcgattgtccaccatccctggggctcctgacgattaatgcatttactgcttgtgactcaattctgattcctgtccaaagtgaatactatgcattggaaggtttaagtcagcttttaaataccatcaagcttgttcgtaaacacttcaatccgcaacttaagattgaaggggttcttttgacaatgtttgaccggcgcacaaatcttggacaacaggtaaattctgaggtcaaaaagttttttggtgaccaggtttatgatacgattatccctcgtaatgtccgtttatcagaggcaccaagtcacggcttagcaattattgattatgataaaaattcaacgggggcacacgtctaccaacaattagcaaaggaagtgttggctaaccatggcaaagaataaaaaaggtgggcttggtcgaggtattgaggccctctttgcggaaaatgaagtaactgagcttacggatgaaacggttcaagatatcaagttatcgttaattcatcctaatccctatcaaccacggcgaacgtttgataaagaggcgttggcagagttagcttcatcgattgaaaaatcaggggtgtttcaaccaattattctgcggcaaacggatccaaaaattaaccgttatgagctaatcgctggggagcgacggtttagagcttctaagatcgccaaacagaaaactatcccagcaattgtgcgtaagatgagcgatgaccagatgatggaaatcgcggttctcgaaaatcttcaacgtgaagaccttacaccacttgaagaagcgcaagcctatcagatgttaatggataaattatcattaacgcaggcacaggtggcaagcagattaggaaagagtcggccttatattgccaattacttgcgattactagggttaccaaaaatgatcaaagagtttcttaatactggcaaactatcgatgggtcaagcacggacaattctcggtttaaaagataagacaaaacttgttccgcttgcccaacgagctgtcgaacaaaatcttacagtgcgacaattggaagagattgtaacgcagactaatggaacggccaaaaagaaagaagaacggcggacacaacgaaaaccaatctatattcgagaagctgaatcacagttgcagagtaaatttggtacaaaagttgctgtcgcgcaaagtcggaaaaaaggcgcaggaaagatcgaaataccttatacgtcaaatgaagactttactcgaattcttgaattattaaatataaccttagattaaggaggaataactcatgacagcatatgataaaggtgacattgtaatgatgaaaaaggctcacccgtgtggaactaaccgctggaagattacacgagtgggtgcagatattaaaattgaatgccaaggatgtggtcatattgtcatgatgacccgtcaaaaatttgataagggattaaaaaaggttatcgaaaaagcggatcaagatgattaatatttttaatgattgatgatcacaaataactaattgtagattaaaataataaatgattaattgaaaaggaaagtgaacaatttatgtcattaactgcaggaatcgttggcttgccaaacgttggtaagtcaacactttttaacgcaattactaaagctggtgccgaaatggctaactacccattcgcaacaatcgatcccaatgtggggatggttgaagttccagatagtcgccttgaccggatccaggaattaattccagcgaagaagatcgtcccaactacctttgaatttaccgatattgccggaattgttaagggtgctagtaaaggtgaaggactaggaaacaagttcttggaaaatattcggcaaactgatgcaattgttcatgttgtgcgggcatttgatgataatgatattactagtgtttctggtaaagtggatccaattgaagatatcgatactatcaacttggaattagtaatggctgacttagatgctgttaataagcgcttggcaaaagtacagcgggctgctaagggtcgtgataaggatgctttagcggaattagaagtactcaataagattaagccagttcttgaagatggcaagggtgttcgctcaattgactttagcgatgatgaacaaaagattgtcaaagggcttttcttgttaacaagtaagccagtcttatacgttgctaacattgctgaagaagatatggcagatccagatagcaacaaatacatggatgcaattaaagaacacgtaaaagatgacggagaagttattggcgttgcagcagctgctgaagaacaaattgccgaaatggatgaagcagataaagcggatttccttgaaatggaaggcgttactgaaccagggttgaaccggttgattcgggcagcctacaagctcttgggtcttgaaacattctttactgctggtggtcctgaaacgcgggcctggacttataagaagggcacaaaggctccacaagcagcaggaattattcactctgatttcgaacgaggatttattcgagcagaagtaatgagctttgaagatcttgatgaattaggttctgaatcagcagtaaaggaagcggggaagctccgtcttgaaggaaaagattatgtaatgcaagatggtgatattgttgaattccggttcaacgtttaaacctctgaagctaagagaggagtagttttatagtgagtgaagaacaaccacggaatgcacaagctggtcaacgtcaaaaacaattagaaaaagaacggcggcaagcgaatgggaatgcctttagcaactatgatctaacacgaaaaaatgaagattttatgtatcaattaaataaacagttggatcgtctcggtgttccttcagataagaaagactcgatgctaaaggaaaccattgataaattgctagcaggacaaaagaaggggcaaactgcgcgggcattatttggtacgccaactgaatatgctaaagaattgaagaacccaaagccaactcctgctgaagcaagtaagcaatcaattaagttgttagcaattgataatatgctgattttcttgagtatctttacttttatgtttggcttaatgttctggttatcaccagctgcaatgcaaacaaagaatgctggaagcagtggtattactgcaatcttaatcgtggcgatcactggaggattgatttttggttatgtggctacccaagttcaaccgcaaattgataagaacggtaagcgggtaagtaagaagccattatggcaacgaatccttttgatagttgctggattagcagcttggttgattatttacatgcttgtaagtatgttgccaaatgtaatcaacccacggcttaatccatggatctacattggcgttggggttattacgttcattggggatatgtacttcaggtccaaatttcatgttacaggttccctttacggtaatcgtgcgccacgacgttaaccagcaaataattttagtaacggaactatttgccaggttatcttattaaaataaataagggtgagaaaaaggtgaaaattttttctcgcccttttattttgctcttttttgaaataaatttctgaaaatctatggacaaatgttcaacggattgttaagatatatacgtaaacttatgaaaacgcattcaaaattgagaggagatcatattattatgaagttaacgcaagcgcaattagcaaaatacatggatcacacaatgcttaaaccagaagctacccccgaaatgattgataagacagttgaagaagctcgtaaatacaatacagcttcagtttgtatcaatccttactgggttaagcgagttcatgaaggattagaaggtactgatattaacacttgtacagttatcggcttccctctcggtgcaacttcaacagaaagcaaagtttttgaaactaagcaggcaattgaagatggcgccgatgaaattgatatggttatcaatatcggtgaattaaaagcaggaaatgatgatgcggttgttgctgatatcaaagcggttgctgatgctactcacgaaaagggtaaacttcttaaagttattattgagaatgctcttcttactgacgaagaaaaagcacgtgcaagtaaacttactgtaaaaggtgatgctgactttgttaagacttcaactggtttttcaacttcaggagcgaaggtagacgacgttaagattatgcgtgaagcagttggaccagactttaagattaaggcagctggcggaattcacagccttcaagaagcttacgatatgattgaagctggtgctaaccgtttaggtgtttccgcttctgttcaaatcttagaagaagccgcaaaacaataagaataaagtttaattactaatcttaatttacagaaataggaggagtcagaaaatgtcatataaacgtgtttttgttattgtaatggactcagttggtacaggtgccgctcatgacgccgcaaagtttgatgatgttggatcagatactcttggccacgttggtgagtattacaaaggtgccttgaagttaccaaaccttggtaaattagggattagtaatttacgtgatactccgattgaaggtgttctagttgctgatccagctattggtgattacggtaagatggaagaaatttctgccggaaaagatagtatggatggtcactgggaaatgatgggtttaccagtaatgaagccattgtcaacgttccctaatggttttccacaagaaattgttgataagcttgaaaaattctcaggacgaaaggttattgttaacaagccatactcagggacagaagtaattcatgactatggtgaacgtcaaatggagaccggagaattaattctctacacgtctggtgattcagtaatgcagattgctgctcatgaagatgttattcctgttgaggaactctacaagatttgtgaatatgcccggacacttgttaatggtccagaatatactgttggtcggattattgcccgtccatatgttggtcccgataaagatcactttacccggactgctaatcgacatgactttagtttgaagccaattggtgagactgatatggatcgtcttcgtgcagcagggtacgatgtaattagtgttggtaagattaatgatatcttctctggtgaagggatcgataaaggataccataacgaaagtaacatggacggaatggatcatgttgatgaagtaatgaagcaagactttaccggtttctgctttacaaacttggttgattttgatgcaatgtacggtcaccgtcgtaatccaaagggctttggtcaagcattaatggactttgataagcgtctgggcaaagttcttgatgaaatgaagccagatgatcttttaatggtaactgctgatcacggtaatgaccctggctttaagggaactgatcatactcgtgaaaatgttccattgctggtttactctccttcaatgaacaagccaaatcaatcccttgggttgcggaagacattctcagaccttggtgcaactatcttagagaactttaacgttgaaccagtaaaaggtaccagcttctacaaggaaattagtaacgattaagattaattaaggaaaggggcgaaacacgatgcgaatggttgatatcattgacaccaaaagaaatggcggagtcctaagcgatgagcaattacaattctttgttgatggcgtcgttaatggaacgattcctgactatcaaatcagtgctctccttatggcaatctatttccaggatatgaccaaagaagaacagacgagcctaacaatgaagatgatggagtctggtgaacgattagacttgagccgaatccctggaattaaggttgataaacattcaacaggtggtgttggtgataaagtgagtttgccacttgcagcaatggtcgccgctacaggaattccggttccgatgatttcaggtcgtggtcttggtcatacaggaggcacgcttgacaagttagaagcaattccgggatttcgagtagaactttctgaagatgaattcattaatcaagttgctaaagaaaaattagcaattgtaggtgcgactggtgaggttgcgccagcagataagaaaatttatggattgcgggacgttactgatactgttgactcgattcctttaattgctagttcaattatgagtaagaagattgcttctggaacagatgcgcttgtaattgatgttaaaactggtactggtgcctttatgaagacgcttgatcaatcaagactactagccaaagcgttagttgagattggtaaacaagcaggattaaagtgtatggcagtaatctcagatatgaatcagccgcttgggaataaaattggtaatgcccttgaaattgaagaatcaattgatgtcttaaaaggaaagggaccaaaagatcttactgaattagtcttggcgcttggtagttatatggttgtaatgggtgaaaaagtacaaaatactactgaggcacgaaagatgttagagcaaactattcaggagggatcagccctggaaaggtttgcggcaatgatagaagcacaaggtggagatcctgctgttgttgataactaccaattaatgccgcaagctaaatacaagattcctttcaaggctgatcgggatggcgtattgacaaaactttcagcagatgaagttggaactgctagcatgttattaggtggaggtcgtcaaaaggcagatgacacccttgactatagtgtaggaatcgaattgcaccataaactaggtgaccatgttaaagatggcgaaccaattttaactatctatagtaaccgccaagaaattccagacgtagaacagttattaaaagaaagtattaaaattagcgatgatggcaaagtaccgacgctaattcatgaaattattgaataaaaagacaggaggatatttcaatgagtacacatattaatgcaaaaatgggtgattacgcagacactgtattacttccaggggatccgctacgtgcaaaatatattgcagaaaacttcctggaaaatgttaaacaagtaaattcagtccggaatgcctttggttatactggtgaatataagggtcaccgtatttcagtacaaggatctgggatgggaattccttcgatgtcaatttatattaatgagttagtacgcgaatttggtgttaaaaccattatccgggttggttcttgtggcggaattgctccagatgttcatgttcgcgatgttcttcttgcccaagggtcttcaactgattcagcggtaacggtaaatacatttggatcaggattccattacgcaccattagctgatttcaagttgttagatactgcctatcatgtagctggtaaattaggtattgaaacaaaagttggggatatctttgctgccgatcgtttctacaatgatgagcttgatatggaaaagcttcgtgactatggaattttaggaacagaaatggaatctgccggactttacttgttagcggctaagcttcatttccgggcactttcagttttgactgttagtgacttaatctttggtgacgaaaaagcaaccgctgaagaacgtgaacgaacattcaatgatatgattaatatttcgcttgaaacggcaattgctggaaagtaacttcttgcataagctagagagtgcattttataataaaatgtggtttagataatgaaagtgagtgggaattaaccttctcgacaaggcggtgggctaaggatagaatggtgattagcacggcacgggttgattatcgttcgaacttagcctctagccttgtggttaatttccacgatatcgtaacaatattagtataaaaaacgaggctgttgaaaaaacaaaagttttttctcagcctctttaatatggggaaaggagggaaattagatgaatgataaagataagattgaattagcgctaaaagtagcaaccttatattatcgtgatggatggaaccaaagcgatattgcaactgaactaaatatttcccgggcaacagtgtcacgattattacaatttggtcgggatcgaggattagtaaccattaaaattcataatccggttgctccgcttcaccagttggaagtagacttactcgctaaatatccatcattgcataaaattattattgttccaggcacggatgatccacttgaagaagttggcgcagcgggtgctaaatatatcgaacaagtcgtagaagataaagacattattggcttaggctggggaaaaaccgtctatcaagtaggattgcatttaaaacctaaagacgttactgatattactgttgttcaaatgaaaggcagtatggcaaatactaatacgcgaaattatgcgtttgaaacggttaatatctttgccaatgcttttaataccgttccacagtatttgccgttaccagttatctttgatcatgcaaagacacgtgaattagttgctaatgatacccacatcaaacatattttgaaattaggggagcagtctaatatcgctgttttcacagtggggacagtacgtgactcagcattgttatttaaattaggttatttcaccaagcaggagcaattaacgttgcaacatgaggcggtaggggatgttttctctcgtttcattgatagcaagggccagatagtaaatgaagatattaatcaacgaacaattgggattgcgctcccagagttgcgaaagaaaaaacacagtattttagtagcagcaaatgttgctaaggtaccagcagtgcatggtgttttaactgctggttatgcaaatacattggttattgatcaggagagtgcgaatagcctagttaattttttaaattaatttaaatatttagattgacctcagtgcgaaatcctagtagagtatacctaattaaaaatcaaaggagttgcactacagatgtcaaattgggacacgaaatttgccaagaagggcttaaccttcgatgatgtattacttattccagctgaaagtcatgtattaccaaatgaagttgacttgagtacacagttagctgataatttgaagcttcatattccgttgattagtgccggaatggatactgttactgaaggaccaatggcgattgcaatggccttacaaggtggcttaggggttgttcacaaaaacatgtcaatccaagcccaagcaggagaagtagctaatgtaaagagcgtagtcgtacctgcaggagcaactaaggctgcagttgatgagaataatcgtttattagttgctgcagcagttggggttactagtgatacttttgaacgtgctgaagcccttttgaaggcgggtgcagatgctatcgttattgatacagctcatggacattcagcaggtgttcttcgtaagatcgcagaaattcgcgaacacttcccagacgcaactttaattgccggtaatgttgctactggtgaagctactcgcgctttgtttgatgctggtgttgatgttgtaaaagttggtatcggtcctggttcaatttgtactactcgggtggtcgctggagttggtgttccgcaaattactgctatttatgacgctgctagtgttgctcgtgaatataacaagccaattattgctgatggaggtattaagtactctggtgacgttgtaaaagctcttgctgctggtggtaatgcagtaatgcttggtagtatgctttctggtactacggaagcacctggcgaagtttttgaagacaatggcaagaagtacaaggcttatcgtggaatgggttctgttggtgcaatggctcaagcacatggttcctccgaccgttacttccaaggtggggtaaatgaagctaataagcttgttccggaaggtattgaagctcgggtagaatacaagggcgatgtttctgatattgttttccaaattgatggtggccttcgttcaggaatgggttatgttggtgctggtgatattccaacattgatcgaaaaagcccaatttgtccaaattactaatgcaggacttattgagtcacatcctcatgatgtccaaattactcgtagtgcacctaactataaataattaatttaataaggaactgctatggctttattcatgaagatatagtcacagcagtttttatttcccgagaaataatggagggtaaactttttgttaaggctatcctagaatgatcgcttttttcgcatagttagttataatattcaataggatattatgctgcaaaaaggagtacctcttatgaaaattctagttgttgatgatgataaagaaattgttcaattacttgaaatttacatccgaaatgaaggatatgagccaatttctgcttacgacggaaaagaagcgttgacaaagctaaatactaatcctgatatcggtctgattattcttgacttaatgatgccagaaatcgatggaatggatgtaattaagcgggtgcggaaagattctgatattccaattttagtgctttcagctaagacggcagatatggataagatacaaggtttaatcactggtgcggacgattatgttactaagccatttaatccgcttgaagtaatggcacgagttaaatcattacttcgtcggagccaaggagaagtgacaaatgatcaaccagatattcttaatgttggtccattattaatcaataaagattctcacgaggttaagacgattaaaggggatgtaattcaattaacagcccttgaatttggtatcttatacttactcgccagtcaccctaatcgtgttttctcagcagatgacatttttgagcgggtatggcaacaagaaagtgtcgtatcagccaaaacagtcatggttcacgtgagtcatttgcgggataaaattgaagaagcaactaacggtgaaaaggttattcaaactgtttggggtgttggttataaggtggaagaccactaaagcctagccttaaggatgtggaggaaaaattgtgaagttaacggggcgtgaaaagagttcgcttattttagaaggggtagtaacggttatcttattgttattgctgaatatggcgattatcgtaattattcaagatgccattcagtcaaatccgggagtaaccaatggaatctttatgattaagcaatcattgaagattggtcctcttcaagcacaaatatggagctatcagcggatcttaattgcctttttagtaattattgatgtgtgggtggtatggtggcgattgcgtcgccggtaccacctttatcagatggatcatattatcgcggaattacactatattgcgcagggacatttggatcatcggattccgtttcggctaaaagggaatcaacagcatgttattactagtgtaaatgcattagttgatagtgcggtgcgttcaatggatgatgaacggaagattgaaaagtcaaaagatgaactgattactaatgtgagccatgatttacggacgccattgactagtattattggctacttgggattgattgaagataagcagtatcgtagtgaggaagatattctaaaatacacccatactgcttatgagaaagctaagcaaatgaagaccttggtggatgatttgtttgaatatacaaaagttcagcaacatggggcaccggtaaatattatgaaaatcgatcttaaccagttaattgaacagttaacggcaagttttgaattagaagcccagcaccgcggaatcgaaattacttcctcagttatccctaatcctttaatgattgaggcggatccggagaagcttggtcgagtttttaataatttagtttcaaatgcctttaaatatggcaatggtgcaagttacattcggatcgatgcccggcaagaaaatgatatggtggtcgtcaaagttgctaatgatggtacaccaattcctgaaaaagcacttgaccacctatttgagcgtttctaccgcgcagaagcttcccgttcacgagctactggtggaacgggattaggtttagcgattgtcaaaagcattgttgatcttcatcatgggagcgtcaaggttacttcaaatgaagacgaaacagcatttattgttacattacctttaaaacaagaagttaaagaaaccaaccaaaaatgagaaaaaagtctaaaatcaaatgattttagacttttttctttttcaattatattcaactaattttatatgtggtagactaaaagagcattgtgtcacttgatattataaaagatacaaattattggaggaaattctgtggctaaagcacaaataaatccagaaaggacacgctggcttgaggtgcttggtgtctcaatgccattatgtcttagttatattccgattggattggcctgtggaatcttactacacgcagcaggtttaaactttataatgattttattggtgtcggtattagtgttctctggtggggcacaatttattctggcatcgttattagcaagtaacgctccattagggactatctttatctcacttttcttcttagagttacgatatgcattgttaggatcgagtttatctaaatatattaaggataaatcagcacgtttcatcctcatcttttctgcatcaatgaacgatgaaaattatgctgttaactatatgaagtttgcaactgataagaaatgggatcccgatgacgcgttgttagtggagtattattcacttgcagcatggtcgacttcaaacatggttggtggtttgatcggtggtgcaatttcgattgaccttgaagtggttgattttgcattaacggccttatttttatatatgatcgtaatgcaggttcaaaaccacttgaccctagttattggcatcttggcagctgttcttggtgcatacttccaggcattgactaaaagtacacttgggattattattgcaaccttaattgcttcctttgttggattcttgattgaaaatacagttcgtcaccatagtaagcatccaaactcgaactggttcttgacaaaaatgtttaggccgaagatcacaaagactacgatcgaggataaacaagctcaacaaaaagaagttaaggaagttgaaaaactggaaactaagattgaagatgttgttgaacaccatgatgagaaacatgaagagaaaaaacatgatgatcaacatcctgatgagggctagacatggaacaactattaagtaataaaatcgtttaccatattatagtgattatcttggcagctttagcggcatttattccccgttatctaccagtattattcttctcaacgcgaaaaatcccagaatggtttaatgaatggatgaaatatgtcccagttagtttatttgcgaccctggttgtaaaagggatcttcttaactggttcttatcattttactctattcggttatccagaacggattattgcagcattgatcgtgattgtgattgcgtactttactcgatcaatgtcgatttcagtaattgctggattggttgctgtttggcttctgagtttagcgttataagagtagttttgttataattataaacagtggattggtttctagcttgcgaagaagccaatcccttttattttaggaagtgagtacgttggattttaagcaaacaattgcatttgttaatcttgctaatactttggattatcaatatgcagcaaaaaaatcagggataacggttgatgaattggttcacacaattaaggcgcttgaagaagagcttaacatcaagcttattagacctgaaggcggcgtagttgaattaactgaaatcggggcgttttaccgttgatcactgagattgctcaaaaacatgctaaattattatcggtagttacggattatcgaaaaaaggaagcggaagaagcgatcaaagttactgtcgtcccaggctttgccaattatcaagcagccccggttgttaaaaaattagcccagcaacataaaatgaatcttgttgaagatgttgatccaatggcacagctacaacaaggggaaagcgagctggcatttattagttatgccggcaaacttcccgatgattttgaggtgctttcagtgggaactgatgacttagtagcttatatcccagcgcggaacccactttctaaacaaaaggaattaacgcttactgatctaaaagcagaaaaatttttaacactaaaccatcaaaatccatttgcagtctttgttcaacaggtttgtgctgcggctgggtttgaactatattctgtttttgaaggagaaaaaggaagaacattagtaaatatggttgctttagggatggggataaccttgttgatggaacaatcaataagtgaaaacttagatagtaaagtggttaaagtgccgattgttcccaaagttactcaaaaccttgcatttgttcgtcgtaaaaatgtagaatacacggcagagcaagaagagttatggcaagctctaaaagaatcctttgaaaaatagaaaaaaggtttgacaatttcgcaaactacgcttattatcataaataacaaaaatacctttaacttagtcccgtgaggctaggaaggatttaattgagcgtttaagtacaccttcttagctattgctgagaaggtttttcttttaagcagtagcaccaagaatacgccagtaaaatcaataggtattttgaaacaaccgaccatttaattgtttccagagagagcagaacggtatgttgtttttagcctacttatatcctaaaagcaaacagtgatgcctctcgaaatttaaatgggaagttatcactgttttgttgtaattagactggaaaaggagcgctattgatgattagtacagaaagaattcaaccaaatttagtaacagttgccgacatggatgcagcagatgcaattgatttaattcatgaagcccaagcatataaagctggaaagcaagcggttctcactgcaccggcatacgcggttaacctcttctttgaaaactcaacccgaacaaagactagtttccaaatggcacaaatgaagttggggatgaatgtactagaattcgaagcgggcacgagttcagtgaaaaaaggggaaagcctctatgacactgttaagacaatggaatcaatcggtgtaaatgttgcggtaatccgtcatcctgaaaatgaatattacaaccaattgattaatcattcagaccttaagatcggaattgtaaatggtggtgatggtagcggccaacatccatcgcaatgtttacttgatatgatgacaattaatgaagaatttggcgatttcaaggggttaaaagtactaattattggtgaccttagtcactctcgagtagcgcactcaaatgcaatgatgcttaatcgtctaggagcagaggtttattttgctggcccagaaaaatggtatgatcctacgctggaacaatatggaacttttggtgactttgacgaattgcttcctcaaatggatgtagttaatttactacgagttcaaaatgaacggctaacgactgctgacggtcaagcttttgacgctaatcaatatcaccaagcttatggtttaactttagagcgagccgcaaagatgaaacagggggcaatcattatgcatccggcacctgttaaccggggtgttgaaatcgatagctctcttgtagaagcgcctaattcccgcattttccaacaaatgacaaacggcgtatatacccggatggcaattcttagtcgagttcttcgttaccaaggattgatgtaaaaaggtgattacgatgagtaaggcagttttactaacgaatggccgacgagtttataatgatgaattggttaagactgaagttttgattgtagatagcaagattaaggcaattggcgagcatatccaggcaccaagtgatgcagaaaaagtcgacctggataatggcttgattacaccaggactaattgatgttcatgtccatcttcgcgaaccaggctataccaataaagaaacgattgctacaggaagtaaagccgctgcacatggtggctttacgacaattgctgcaatggccaaccttaatccgacatgtgacacaccagaaaaatttaaagaacaggttgatcggaacgagaaagctggactggtaaaaatcctccaatattcaccagttacagttggtcgggctggaaaacaagcagttaatgttgctgagcagtatgctgcaggtgcccgtctttttagcgatgatggtgcgggaattcaagatgctggagttgtataccaagcaatgcaacaactagcgaaagttaacgctccgttatgtgatcatgcgcaagataatcaacttgcacaaaatggggtaattaatgatggggcaactattgctaaaaaactagcactaccaggaatgccagcgattagtgaaacagcgcaaattgctcggaatttggtgattgctcaggcaactggggtccattatcatgtttgccatgtttcaactaaagaaagtattgacctgattcgtcatgccaaacaacaaggaattaacgttacatgtgaagtgactccccatcatttacttttagccgatgctgatattaaagaggatgatgctgaatttaagatgaatccacctcttcggcagcgtcttgaccaacaggcttgcttaattgggctattggatggcacgattgattgtattgctactgatcatgcgccacataccgatgcggagaagcagcaaggatttcttaaatcaccaaatggtattgttggctcagaaacagcttttgccttactctatacacactttgttaaaacgggtatctttacgcttgcccaattgattgactggatggccgttaagccgcaagcgatttttaaccttgataacgctggattattaaaggtaggggacccagcagatattgctgtatttgatatcgatcatcaagatgtaattcaaccagaccagtttttctctaagggtcacaatactccatttgttggtaaacaagtatacggaatgactaagcgaacttatgtcgatggaaaactcgtatatctggagggagaaggataatgcaagaaacacaacgattagcagttgaattgccgggattatcactaaaaaatccgattattgcggcaagtgggacttgtggatatgggcaagaagcagctaaaaagtataatcttaatcatttaggctcccttgtgttaaagtccactaccctccatccccgccaaggtaatccacgtccgcgagtttgtgaaaccagtgccggttggcttaatgctaatggtcttcagaatgtgggcattaccgcagcaactaatgaaaaaattccgtggttacgaaaaaattatccgcaactaccgattattgcaagtgctgctggtttttctgaagacgaatacgttaaagttgttagtgaatttgctaatacggctggggtgaaagcaattgaattaaacgtatcatgtccgaatgtaaaacacggcgggatggcaatgggaactgatccagaagtgcttcaacgattagtaaaacaagtagttaaagttgccctaggaattcccatctatgtaaagctaacaccaaatgtaactaatattgttcccctcgcgcaagcagctgagcaagggggcgctaatggcctgacgatgattaatacgttaacgggattaagcatcgacttaaaaactcggcgcccggctttagctaatgtaacgggcggtttatcaggtcctgccattaaacctttagcattaagaatgattcaccaggtccgccaggtttcttctttaccgatcatcggcgtgggtggaattgaatcagctgaagatgttcttgaatttatgatggcgggtgctaatgctgttcaaatcggggcagctagttttcatgatccattggtttgcccgaaaattgcagctgatttaccaatcgtaatggatagatacgggattaagaaacttacggatttatgggaggtaagattttgaaacgcttcgtaccgatggtggctatcgatgttgcaactaagcaggaagcaattgacctatttgataaattaatggtaaaaccgcagccgatcgtaaaaattggaatggaattatattatggcctgggacaagtaattgttaaagaggcgaaaaagcggggatttaaggtattccttgatttgaaattatacgatattccgaatactgttcatcgcgcaatggcagctattggccgattgggaattgattttacgacaattcacgcagctggaggtagtgaaatgctgattgccggattagccggtctagaagaaggagctaaggaagcaggcgttgaaccagcaaagttattagcaattacccaacttacttcgattgatgaaaaaattctccatgaacaacagcatgttgatttgtcgttgattgagtcagtccaaagttacgcgcgcttagcagaaaaagtaggattggccggcgtagtatgctcagcccatgaaatcaaggcaattcgtgaagtgacgggggatgatttcctatgtgtaacgccaggaatccgcccaactcatgcaataaaagatgatcaaaagcgagtggttacaccagcacaagcaagaatagatgggagcaatgcgatcgtagtgggacgaccaatcacccagagctttgacccagttgctgcttatcaagaagtccaaaaagcattcttaaatgaggaggaagaaaaatgacatattcacaacgcgttgcaaaagcattattagatattcatgctgttacccttagcccagaccaaccatttacctgggcaagcggtctaaaatctccaatctataccgataatcgattgacgatttcttatccagaagttcggcaagcaatttttaatgggatggttgaacaaattaaacttcattttagtgaggccgatgttattgccggaacagcaactgctggaattcctcatgcggcatgggttgcccagaatatggaattaccgatgatttatgttcggactaagccgaaagatcatggtcaaggcaagcaaattgaaggggtgcttaaagaaggacaaaaagtcgtcgtgattgatgaccttatttcaactggtggtagtgtattaaacgctgtgcgggcggttaacaatgcaggcggaaaagtaattggcgttgtttctgtctttacttatgatttgccagctgctgaacaaaactttatggcaaatggactaaaatactattcagtaacggattatatgactttgattaaggtcgcaaaggaaaatgaccaaattagtgcggaccacctcaagtctcttcaagaatggcggaaagacccgttaagctggagtaaagagcaagcatcataataattaattatcaaaaaagcctaagattgattcagaaaaaagttaatctgaattaatcttaggctttatcttattgtttatcttcccaaatcttttggagcattgggtagcgtaagtcaccaacttgtactacttgataatctgcatttgctaatgttgtagcatcaccaacgccaattgcaattgcatttatatggtgaatattttcaatatcatgagctgtcgttccaactccaatgcaattagctccgataagatttaattgattaacagcagttagatatgggctttctttatcattagtcctaacgatactatcgacataattatcaaggccaatttgtttaaggacattttgtacatctccattagcatctaacacggcaattttaacgtaatgatcatagagatttagtaaaagacgcttaatccctggaagttgatccttttcacttaggctatccgcttcttcgttaaggaatttttgccattctgcaatcattgaagccttttcgcttggggcaggattagcattaaaatgtgctaagactagggagagcccttgcgaaggagtaaggttatcgaattgggaagctaattttccaggtaatcccatcccaaattcatacattacaaaacgttgccatgcagtaaaggataacttatttgtattaacaaagatattattaaacgaaaaaatcgcaccatccatgattaaacatcccttcatagataattatgtctatattttaacgtaatcgaaaatgaaagggaatacattaattaagcatttactttagcgaggttagcggcataatcgattccctttacatctaaatactcaataatttgattgattgtaataaatggtacatgaactcggttagcaaggactgacagactatcacgacgagccatcgtgccgtcacgctttaacacttcgataataacagcaactggtgcctttcctgctaaataggcaagatcaatagctgcttcggtgtgaccgattcgatctcttaatccatgaggttgggcgtaaagaggttgaatgtggccgggatgattaaagtcagatgcttgggcagttggcttggcaatttgccgaatcgttgctgcgcggtcaaaagcggaaacaccagtagtaacaccggttgcttctaaggtaccatcagtagtaaccataaatggtgtttggtgtgggtcagtgctatgctctaccatgggcttaaacgctaaatgcttagcaatatcttcgcttactggcacacacatcaaaccatttgcctcgttcaacatttcatagatagtatcagcgttgacattttcacctaaagctactaaatcaccttcgttttcacgatcttcattatcggctaagataatataaccaccatttactaattggtttaatgcttcttcaacagttgaaaattgactttgcataatttatatactcctttgaaattctgaaagtgatagaacagttacattcgaatgtgttattataataacgaacgttttaatttaaatcaacctatttttaaactaaaacacgaataatattaaaagatttcaaagggtaagtttgctaaagagctggagaaaataaagatttctcaccagctctacgctctatctttagagtaacaaaaaagtccagaacgagatatttttcgtcctgaactaatcttaggttgttctattttgtcatgtaatcacgagtcattggtaagtttttacctgaaggacccttagttatcaagtattgaataacatcaatatttccagattcaaatgatgcagcacatgtttgaagatataaatcccacatccgtgtaaaacgttcacccatcatatcaaggatttgagcacgatgttcattaaagttcatgtcccaaatttcgagggtgcgttgatagtgacggcgaagcatttcgatatcagcgatttgcatatgattttcttcaatgtgaccgatcatttcttcgagaccaggtacataaccgccagggaagatatacttgttaatccacccattatatgcaccgccttgttgacgagtgataccatgaatcaaggcaacaccatcatcagcaaggcaaccttggatatctttaaagtaaaaacctagattttcttttccaacgtgttcaaacataccaacggatgtaatataatcccacttttggtcaccaagttcacggtaatcaacaagtttaacttcggcaacgtcttgcaaaccttctttttcaatccgttccttaacaaagcgatattgttcttcgcttaaagtaaccccagtaacttttaagccatattcttttgcagcagttaacattaatgttccccaaccacatccaatatcaagcaatgttttgccaggctttggatcaagcttctttaagatgtgatgaaccttatcaacttgtgcttttgtaagctcatcatggttgccatcagtaaaataagcacatgagtaagttagcgtatcatcaagccataacttgtagaagtcgttcccaacatcataatgactttggacatcattttcgctctctttttctgagtggccttgtttaggcaaaaatttgcggaacttagaactccgcataaaactatcggcactttcatatgctgattcgatcaatttttgaatgctaccctggatctcgattttcttatccatgtaggcttccccaagtgcaattgaggcgttcttggtaatatcacgcattggaattttctcattaaaggtgatagttacctcaggagttccgtcaccatagataacacttgatccatcccaaaatacgatctttacgggaatgttaaatgagtgctttagtagtgacttgtagaacgtcttttctaacatgaaacgcatccttctttctgcaataataatattcattataacacccttaaaataaaagtgtttcaagacaattaatgaaaacatttcataagaaagcgataaactaattgctgaaaaaatgaaagcttgctactatgctaattagtaggaaaaatagggagatgattgaatgacgaatgcctggaagcattttattgagaatgtaaaactacggcgtttcactgtcttattattaatcattgtcgtactctggctaatgaaatcaatgatgaatttaattttatttacatttattcttacttatcttgttgttagttgggtaagactcgtccagcgatggttaccacgaatgtcgacaagtttaattgtaatcgttacctatgtattgttaattgttctcttatacttaggggtgacccgctatttaccggttttatctcggcaagttgttaaaatggtcaattcagtagttcatttctatagtactcatcaagcgacgatgatatatcgttatgtcagccattacataagtaccgccactattatgagtcaggttcggcatgggataacaatcgcggttagtactttgacaagtattggtgcaattaccgtttcatttgtaatgtctttaatcttgagctttttctatacgcttgaattaaaacaaatgaatgaattttctcatagctttttagatagtgattttggctggtttttccaggatattgattattttggtaaaaaatttgtcaatacttttggggtagtattagaggcccaattttttattgctatttgcaatacagtgattaccacgattggcctattatttatgcggatgccgcagatttttgccctatcgttaattgtgtttatctttagtttggttccggttgctggagtaattatttcaacaatcccattggcgatggttggttactcagtcggtggaattcgcgatgtggtttacattatcatcatgattatcatcatccatactttggaggcctacgtcttaaatcctaagtttatgtctagccggacagatctaccaatcttttatacttttatcgtattactgattggtgaacatctttttggtacatggggattgattgtgggggtaccaatctttaccttcttacttgatgtattaggcgtaaagcccattcgcggtgcaaaaagaataaaaaaagaagtgtgagtgagaattagccttgtgacgacgcgaagctatttccataatgtcttgctactattcatggaaacagttaaggctgggagaaaaagttttctcctagttttttgttatccgaacaatttatgttaattcattggataaagttaattaaaatcgaacttattttgcaaaattgctgaaaaagtcttgagttagtgtataataaaattaagataggtctaaagaaaggaagctgatattcatgacagacatcgagattgcagaccaagcgacactggaaccaattacagaaattgccgagaaactcggactttcagaagacgaaatcgaacaatatggtaagtataaagccaaaattgatttaaatgtaaagcctttacctgataaaaaacataagctaattttagttacgtccatcaaccctactcctgctggtgaagggaagtcgactgtcctcattggcttaggggatgcattaaatcagttaaattatcagacaacgattgcaatgcgtgaaccatcgatggggcctgtttttggaatcaaaggtggtgcaactggtggtggatatagtcaggttgttccaatggaagatattaacctgaactttaccggtgacttgcatgctcttacaagtgctaataatactttggccgctttaattgataactatattatgcgtgataatgcaatgaaccttgatccgcggcgaattatctggaaacgggtagaagacgttaatgatcgtgctctccgaaatgtagttaccggtcttggcggtccaatggctggtgttccacgtgaaacaggctttgacatcacagctgcttccgagttgatggcaattttatgtctatcaactagtcttcatgacttgaaagaacggattagtcgaattgtagtaggatatacatacgataaagaaccggtcacagttggccagcttaattttcaggatgcaattacaattatcttgaaagatgcattaaagcctaaccttgtccaaactttagaccatacgccaacaatcgtacatgggggaccatttgccaacattgcccatgggtgtaatagcgttttggcgacgcaaactgcccttaacctttctgactatactgtgacggaagctggctttggggctgaccttggtggggaaaaattccttgatattaaacaacgtgttcttggtaagcatccagatgcaattgtcatcgtagcgactgttcgagcgctagaatacaatggcggtgccaaacttgcagacttaaatgatgaaaatcttgatgcgctgaaaaaaggaatggcaaaccttaatcgtcacattaagaatatgcaattatatgggttaccaatcgtagttgcaatcaaccattttgtcagtgataccgataaagaaattcaaatgattaaggatgactgtgctaagcaaaatgttgaagcaattttgactgatgcttgggctaagggcggtaaaggtacccatgatttggctaataaagtagtcgaacttgctgatagtccaagtgaatttactcatatctatgacgttcaagttgatgaccttcaaactaagttagagaagattgctaagcagatttatggtgctaaagaagtatcatttagccgtaaagcacaaaatcaattgaagcgatttgctaagtatggatggaatgacttgccagtatgtattgctaagacccagtactcatttacagatgaccaaaaacaactcggtgccccaactgactttactttccatattcgggaattggtaccaaagatcggtgccggctttgtcgtggcattagctggtaatatgatgacaatgccaggcctccctaaagaaccagcggctgtaaacatgacgattgacgataatggtaaaattaccggattattctaaataaccaacacaaaacatcgattgtgcaataacgtacatcgatgtttttttcacaaacttttcaaggctagcgggttgaagttattgatatactgctatgtgaacttaatcgttttcttgtgaaattataaaataaggactacagtagaggtatatcgttttataagtttaattaggtagaggtgaatgactaatggaagagaaactacatggcgcagatattgttattgatagtttgagaaaacacggggttaatctcgtctttggtattcccggagcgaagattgatcgtttgtttgaaggactagatggtcaagacagtgaagatgcacctaaattaattgttacccggcatgagcaaaatgcggcgtttatggcccaagcttatggtcgcttaaccggaaaaacaggggtcgcgatcactacatctggcccaggagttggtaatttagcaactgggatcatgacagccaacgcagaaggagatccaatgttagcgattgggggacaagtacaacggaaagaccttcaccgctcaacccaccaaagcacgccttcaactgaaattatggcaccgattacgcaatatagcgctgaaattcaagaccctaataatatttcagaaattatggccaatgcatttgaagcgagtcaggatgcacgtaagggagcagctttcgttagtcttccacaagacgttgatgatgctgaggtaactgaaaagccattgccaatttatgaaacacctaagacgggtcctgctgatccaaatgacttacaaaaactagtcgaactaattaaaaatagtaaaatgccggttatcttagtcggtcaacggggcgcggatgaagaaattacgactgctatccgcaaattattaagtgattattcattgcctgttgttgaaacatatcaagcggctggagtagtatcacgtgacttagaacaacagtcatactttggacggattggccttttccgtaatcaagtaggagatcagcttcttcaacaaagcgaccttgttattgctgttggttatgatccgattgaatatgaaccacggaactggaacaaggaggggaatctgcgaattgtaaaccttgataccttgccagcgcaaattgataaccactatacgccaatcatgcaactagttggtaatattgctataagcttaacggagcttgataagttactaaaagggtatgaatatcctgttgcagccactgagcaactcgctaagtataagcaagaacttgaccaagataaaaagattcaagtaccaacaagcaatgatgccagccatccgttagcagttgtgcatgcaattcaagaaaatgttactgatgatatgcacgttgcgctcgatgtgggttcccactatatctggatggcacgacatttccgctgctaccagccacgacacttgttaatcagtaacgggatgcaaacactaggcgttggcttgccatgggcgatggttgcagcgatgctttatcccgaatataaatcagtggcagtttgcggggatggaggcttcctcttctctggggcggaattagcgacagccgttcaacaccatcttaatgttgtaacgattgtatggaatgatggcggtcattacgacatggttaagttccaggaagagatgaagtattcgcaagcagctggtgttaaatttggaaatgttgatatcgttaagtatgctgagagttttggtgcaactggactgcgagtaaataagccggctgaccttactaaggtactcagtcaagcgtttaatattgacggcccagttgtggtagatgtgccagttgattacagtaataataaagaattagctgccaacttgattgattcacaacttggctaagaggagaacaaagattatgacaacattatatgaacacggaacgttagctgcgttgatggcaggaaattttgatggcacaattactgtcggtaatttgctaaaacatggttcgatgggaatcggtacttttactggcttagacggtgaggttgttatcctgaataatgaagtgtaccaggccgtttcaagtggtcaagttaaccacattacagatatggatgctacaatgccatttgcttcagtccattttcctgctgaacaacaggatataacattaaggaatataaactttgctaaactgaataatgattttgttaaagaacatcagcttactaatgtttttgcattcttacaattgagtggtgagtttaagcacgtcaaaattcggattgctccgaagcaagaaaagccatacccgactttactcgatgttgcgcaacaccagcctgaatttgcggctgataatatcgcagggacaatcatcggctactatgcgccagaaatctttggaacaataacggcagcgggatggcaccttcactttatcagtgatgatcgacaatttgctggtcaccttctggcgtttgatgccccagaattaacaggtagctttgaaatttttgataacctggaacaacatctgccgattcataatcaagaatttcgggagagtacagttgatatggcaactttacgtgatggaattgctaaatcagaaggaaatgcagactaaagaacaaatgaagcagcggtataaataacgccgaaaaagggctccagtgctcggtaacgaactctggaaccctttttgtgatttctaaaatatcattttaagttgtcgtttttaatgagttgattaattagtagtcgcttggaaaaataatatttgcagatttacggagacggtatagagtcatattaacaattttagctagttcaatccatcgttgataattatcctgctgctgtggcgattcggggttagtaaagagttgtgcaaaatcgtttaactcgtcaaacatggtgttatctaagtagtggttattgataacttgaatactcccctgattattaagataagtcactttcttagtatcgaaaatactgtcaattattagcgtgtcgcgaagcctatatttattgccaaatgcttctgcggtgctaagcttacgggaatacacaacagtaagttaatatttccaagtatcttgtgctgcatgaatcatctagtcaaaaatagtatgggttccaataattcctaatcgtaacataagctagatttcctggttagccattttgtagatttataccatgtcatcataataaagaactttctgatcccttgtgcccaccggtagcattaggacatgattgtgacatttccatttctgcttggcaggtatttcaatagtgctttttacactaaatacctaaaccctgttttaaaaaatcgttcagttgaagttttggtgattcaagaatctaacccgaccggcaaaaattcattaccttactccaccagctaacagatgtggcggaccagcctgataagtaattttaaatccgcaatctcctttcacaagcttggttgacactaattgctgaaattaagtttcaagaacaacaccagcaattgacggttatcccacgtgaacgcagcaaaaatattttagcgtatttgcacaaacactatgcggaaaaggtaacaattaatgatagtgcaactgcggtcaatattagtcccaaagaatgtattcggtcatttaagaaaaacattcaccaaacgccaattgaatacttattaaattaccgggttgagcaggcaaagaaaatattgcggcattcggagctttcgatcacggatattgctttgcgggcgggatttagtacgagtgcctattttagtaaaatatttaaggaacgggtaggaatgacactacgggaataccggcagcgtcaagggtagcttactttaagtttaaaattttacttatcaatgtttccatgtctgctgggttaatgactttttcttggcgcggcgtttggtctactaacgcttggacaccatcgctaagctgatctcccagaagatcatgtaactgttgaagagcaggaagcccgatttgactaactttttggttggttagtgcgtggtagacggtttcagggaatttatatggactggcagttgacacgataactgtgggagttgtgtcatggctttgttgctgatattgatgtgttacatgtgatgccactgcagtatgcgggtcaataacatatccatcatttaaatatactcgtttaatttcggcttcaacttcatctggggtcgcaaaaccagccacaaattgctcctgaagcttatttaatacggtggaatctacctggtagtgaccgtcagtagctaattgcttcattaatttagcaactgttacgcagctttcatcataaagatcaaagaggagccgctcaagattacttgatactaaaatatccattgctggtgagttagttaggtaaaagttgcgtcgccgctcatattttccgctcttgaaaaagtcggtcaatacattgtttttattagaagcacacaagagcttgttaattggtaagcctaattttttagcgtagtaaccagcgaggatatcgccaaaattaccagtcggcacggtgaaattaactttctcccctagttggatcccgcctgtatgaacaagctgtccgtatgcagcaaaatagtacacaatttgggggataagccgcccgatattcattgaattagctgaggaaaagcagttattattttgcgcaaggcggtcattaaatgcttgatcgttgaaaatatgtttaacgcttgtttgggcatcatcaaaattacccttaattgcgattacgtggaggtttgatccaggctgccccagcatttggcgtaattgaaccggactaaccccgccagcagggtagaagacgattacctgtgtgtctttttgattgctaaaccctcgcattgcggctgttccagtatcaccagaagttgcggtgaggataacgatttgtttttctagttgggtgttttgtgcagcacgtgacactaattggggtaacatttgtaaggcgatatccttaaatgccagtgtcggcccgtgaaaaagttcaagataataattgctggcgtgtttgggcgttaatggggcaattaaacggttatcccactgactaccataagcggtatttgcatttttcagtagttggtcgctcgtaaattcatcaaaaaaccagttaagaatagttgcagcaagttgttggtacggcaacgaaattaaggttgcaaggttataagttggttgaggaaaatgaagcggtacataaagaccgccgtctggagaaagtccttgtaagatagcagttggtgattttaaaatcgttgataagtctccctgagtgctacggtagtccatgataattcctccaatttcaaaggtgattttattttaattgtatgtttcttatatgctatggtacaatgctgaaaatgaaaaaacaatgagaaactgaggcgggaaaatgaaaaacattaaactgggactgctcggtctgggtacggtcgggtcaggagtcttacagatggttcaacaaaatgcagataaaattctcgatgttactgggtgcaagttaacagttaaaacagctttagttcgaaaccttggtaactataataagtatgctgatgaaacttctttaacaactgattttgatgaaatcttgaatgatgatgaaataaaaattgtcgttgaacttatgggtggtattcatccggctaaagaatatattacaaccttattaaaaagtcataagaacgtggtcacagcgaacaaggatttgattgcgtcttatggcccagaattgatgactgtcgcgcatgaaaatcactgtgacttaatgtttgaagcgagtgtggctggtgggattcctattttgcggacgattgctaatagctttacggcagataaggttactgaagtaaagggaattgtaaatggaacaacgaattacatcttaacgcaaatgagccagcggggatggtcataccaccaagcacttgcccaagcacaacagctgggatttgcagagagtgatccaaccaatgacgtgacgggtaaggatgcggcttacaagatgattatattaagtcaatttgcatttggaactcaactagatattaaggacattgcggtagaagggattgaccgattgaatgacgctgatgttcaacaagcagcgtcatttggatacgtaattaaattactagggattaccaagctggttaataatggagtatttgtcgaagttggcccagtgttaatcccccgtgatcatcctttagcaacaatcaataatgaatttaatgcagtaatggttacagcccaagcagtcggtgatacgctcttctatggccgcggtgcagggggcttgccaactgctaacagtgtgttaagtgatattacaacggtaacgaaaaacattatcctgggaactaatgggaatctctttaataattaccaacaaccttatattccggcaaaacttgctgatataaaatatccatattatttatcgttaaccttgccggatgttcctgggcaaatgttgaagctaacccagatgatgacggatattaatgctagttttcgtgaaataacccaaacaaaagatggcaaaattgcgcacattgcaatcattactcaccggatgagcaaagaacaattacagacattactaactaaagtagctaatgatcagtcaattaacttgtcggcggcttataaagtgatgggataggaggaagtataatgattattcaagcacctgcttccagtgctaatcttggcccgggatttgactcgattgggattgcagtctctttgtatttaaaattagaagtccttggtccaagcgataactggcaagttgatcaccagcttgggaagctccctcatgatgagacgaatatgattgtaacaacggcattaagtgttgcaccggatttgctgccacagcacctgcaggtagtcagtgaaattccgatagcacatggattaggaagtagttcaagcgcaattgttgctggaatcgaattagcaaatcagcttaagaacctgaaccttagcaaggaagaaaaagttgagattgccagccagattgaaggccatcctgataatgtcgcaccgactattctagggggattagtagtggggacacatattaatgggcatttttctgcgattgaagcgcccttattcccctatgcttttgctgcatatatcccgccttataatctaaaaacagctgatgcgcgagctgccttgccatatcaactagaatattcccaagctgttcatgcgagcgcggttgctaatacctttgttgctagtttgtttgctaaaaactatgatgtagcgtttaaattaatggaggcagatcgctttcatgaaccatatcgcaaagagctagttccagaattagatcaaattcgtgaattaggaaaaaaacatggagcactagcaacatatttaagcggcgccggaccaacagtaatgacagttatcgataatgacaattacggattatttgaacaggcagtgcatgctgcggggctaaagggaaaagtagtccgtttacacccagatgttgaaggagttaaactaatataatttaggaaagaggctggaaatggattcggccttttttcttttttatgaattttaacgaactattttatgttttaactttattaagttcgatttttacattgaattataaaaaaatctttgctatccttaaagcagatttgaggaggcattgttatgagtgatattagtgtagtaatgggcagtaaatcagactggccaactgttaaagaaacttgtgatattttagatgaatttggcgtttcatatgaaaagaacgtgatttctgctcatcggatgccaaatgaaatgttcgcgtttgcgcaaaatgcggttgataatggggtcaaagtaataattgcatgtgccgggggagcagcccatcttcccggaatgattgcggcaaatacccccctgccagtaattgggatcccaggacagacaaaagctcttggtggcatggactcgcttttatcaattgttcaaatgccagcgggaattccggtggcaaccactgcgattggaaaagcaggcgctaaaaatgcagcgttattagcattgcaaattcttgggatcacagataagcatatccaacaacaaattatcgaatatcgacaggcgatgcatgatcaagcaaaagaaagtgggcagtatcttgaataaatttattccacaaggctcaactattggcattattggtggtggccaattgggacagatgatggcattggatgccaaacagacggggatgaaggttattattttagatccgacaccaaattgtccagcggggcaggttgctgatgaacaaattgttgctccttatgccgatactaaagcgattgaaaagttagctgataaagcggatgtattaacctacgaatttgaaaatgttgatttaaacgctttggaagatgtacaggatcgcgtttatcttccccagggaactaatttgctttacacgaccaaaaatcgtttacgggaaaagaatttcttacgtcaggcaggggtaaaaacagcacctttcatggaagtgcatacttctgctgaattaaaagatgcagtaaagaaaatcggttacccagcagttttgaaaactagtgaagggggatatgacggacacggtcaagaagtattacgtaataaggatgacctcgataagtgtgcgtctattttagccactggcgactgtatcttagaaggctgggttccttttaaccgcgaatgttcagtaatggttggacgtaatgaagatggagaaataacggcttttcctgtttcagaaaatattcaccatgatgaaattctacatttaagtattgtcccagcaagaatctcttctgaattacaacaaaaggcgcaaaaaatagcggtgcagattgcccaagcgattaatttgcgagggattttaggggttgaaatgtttgtaacagatgatggagagatctatattaatgagcttgctcctcgtcctcacaattctggtcattattcaattgaagcttgtaacttttcacagttcgccatccataatcgagcaatttgtaactggccactcccacaagtagagttattaaagccggtggtaatggtaaatgttttaggtcagcatgttaatggagtccgacaacagattcagaaaaaggcaaattggcattttcatgattatgggaaagcagaagttcgtcataaccggaaaatgggccacgttacaatcttgactgatgatattgaagctactttagcagaaattgacaatacaggtatctggggtgcataaagttcggctttacgtaaccgcttttcctgtgcgataatacatttagaaaaaatagagaggatttttaactgatgattgatcgttataccagtccagagatgaaaaagatttggagcttagaaacacaataccaatgttggttagatgttgagattgctgctgatgaagcgtggagtaagcttgggcatattccagcagaagatgtggaaaagattaaaaagaatgccaagttttctgtggagggaattgcagagattgaagcagtgactcatcatgatgtgattgcttttacccgtgatgtttctaaatcattggggcctgaacgaaagtgggttcactacggaatgacgagtacagatgtagttgatactgcacaaggcttgcgattaaaaaaggcgaacgatatccttcgtcaagatattgataactttatggatgtccttaaagaattagctgaaaaatataagtacacagtttgtatgggacgaacacatggtatccatgctgaaccaacaacttttggcttgaaagctgctcggtggtattcagaaatgaagcgtaataaagaacgttttgaacatgctgctaagggtgtcgaagcgggtaaaatttctggtgcagtaggaacttttgctgaaattgacccatttgttgaggaatatgtctgcaaaaaacttggcttacgtcctcaagaaatctccacacaagttcttccgcgagatttacatgctgaatatattgctaccattgcgcttattggaacaagtatggaagaaatggcaaccgagattcgctctcttcaacgaacggaaatccatgaagtcgaagaacactttgccaagggacaaaaaggatcttctgctatgccacataagcgtaatccaattggctcagaaaacattactggttgtgcgcggatgctccgtggctttatggtgcctgcttatgaagatgtttcgctttggcatgaacgggatatttctcattccagtgcagagagaatgattttaccagatgcaacttcattacttgattacatgttgcggcgttttggtcgaatcttaaagaatctcgatgtattccctgaaacaatgaagaagaatatggacaagacattgggcttaatttacagtggtcgggttcttttgaagttggttaacagtggaatgactcgggaagcagcttatgatttgattcaaccatataccgctaagtgctgggcagaacagattccgttccgtccattattggaagatgacccaacaattcaaaagcaattaactaaagaagatcttgatgatgcctttgattaccactggcacctccgccatgttgatgacatttataaaaggttgggattagactaatttaagttagtttaagaggctagacgaacaaaaaagtttgcctagcctttttattatgctttgtttagtaaaacacgaacaatttgaactgaaaatcatataaatatcgtaattcgtattgacaatcgggagggggaaagagtatattgttgtcatgaaatatcgaattaattttcggatattaaaataaatgttcgttttttactgaaaggaagttccgtaaatggagaagttattgtataccggcaaggcaaagcagatgtggcaaactgaggatccagcggttttacgagtagtttatctggaccaagctaccgccctcaacggaaaaaagaaggatcactttactggtaagggtaaggctgccaatgctatttcttccctcgtttttggttacttaatgaagcaaggaattgagacccactttattaagaaactatcaactaacgaagaccttgtaaaaaaatgtgagatgttcccgcttgaatttgtaacgcggaatgtaattgctggccattttgcaagtcggtatggactttcagaaggggaagagcttccttcaccagttgaggaaacgttctataaaagcgatgagcttaatgatccctttatcaatgaatccgcaacgattgctcttgagattgccagcaaagaggagcttgcgcaaatgtgggggatctgtcggaaggtcaataacttacttaaaccattatttgccaaagctaatttacggttggttgacttcaaactcgaatttggccgtttaagtgatggcaagattattcttgcagatgaattttcgccagataactgtcggttatgggatctgacaactatgcagcatatggataaagacgtatatcgacgcaaacttgctgatttaacccaaacatatgatgaggtattggaacggttagaagcagtgatgaaggaggaagcataaatggttaacgttcggattttcgtaacatataagcaatcagtctttgatccgcagggagaaacaattaaggatgcgatccattctctaggtcatgatgaagtaactgccgttaaagttggaaaattttttgacgttaccttggatacaaatgaggatgaggtagcaacggcagtaaaagaaattgccgatcagctccttgttaatttcaatatggaaacttatacataccaagttatggaggaagcctagatgaaaattgcggtggttgtttttccaggatccaattgcgatgtggatttatatgaagcccttcattccgtttgtcatgcagatgtggagtatgtttctcaccggcaaaaaagtttagctggttttgatgctgtgatgttaccaggaggattttcctatggtgattatctacgagctggcgcaattgctcggtttaccaatatcatgcctgcaataatcaaaatggcaaatgagggtaaaccagtctttggaacgtgtaacggatttcaaattttgacagaagcaggtcttttgccaggtggactcaaacgcaatgatagccaacgctttgtttgtaaaactgttcctttagaagtagtgaactcgcaaactctttttactagtcattaccaggatcacgaacgaatcgcattaccaattgcgcatgccgatggtagttactatgcagatgaaaaaacattagatgaactggaagcaaataatcaaattgtttttcgttacgcgactgaaaatccaaatggtagtttacgcaacattgctggaattactaataagcacggaaatgtcttaggcatgatgccccatcctgaacgggcagtagaaactattcttggcagtacggatggcttacggttatttgaatccttgttagaaaacggcagaattaaagtggaggcatagttaatgaagcaagcaatgaccccagaagagattaaagaaaagaaaccatacttagattggagcttgacagaagcagaatatgattacattcgtacccagctcttggggcgattaccaaattatactgaaactggcttattttctgcgatgtggagtgagcactgttcatataaaaagtcaaagccggttctgcgtctcttccctaataaaaatgagcgagtattgcaaggtcccggagaaggagcaggggttgttgatattgatgatggacaagcggtggtattcaaagctgaaagtcacaatcatccgacaactgttgaaccttatcaaggagcagcaaccggtgtcggtggaatcctgcgagatattttcagcatgggggcacgaccaatcgcttcccttgattccctccatttcggtgaattagataattcgacaacgcggatgaaagtaactaataccgttcggggaattggtgattacggtaattgtatgggaattcctacaattgcgggtgaaacaacatttgatccatgctaccagggcaatattctgtgtaatgcaatgagtgtcggcttaatggaccagaaagatatccagcagggtcgcgctgccggaattggaaatgcagtgatgtatgtcggcgctaaaaccggccgtgatggaattcatggcgccacctttgcttccgcagactttaatgatgaaaatacgacgcaacgttcggcggttcaagttggtaatccttttatggaaaaactcttattagaagcctgtcttgaccttattagaaatcatccagactggttagtaggaatccaagatatgggggcagcagggattgtttcttcaagtgcggaaatggcttccgaaggtaaaagtggaatggagctaaatttggatcttgttccgcaacgtgaacccgggatgtcggcttatgaaattatgcttagtgaatcccaagaacggatgctactttgcgtaaaaaaaggtcatgaagaagatgtcaaaaagatttttgatttttacgatcttgaagcggtcacaattggccggattactgcgggtcatgattatgttctctttcatgatggtgaagaagtatgtcatatcccagtgtcgagtttaacggatgacgtactagaagaagaaagcctcgaaaaaaagcctgcgcggattgaattagccgagcagcagccagcgtggattccagatgttgataacgttgctgaagttttaactgccttgcttgctcagtcaacgattgcggataaaagtagtctttatcagcaatatgattctcaagtacggacaaacacagtggctgggcccgggagtgatgctggagttctgcggattcgtggaacacataaagggttagcgatgacaactgatgggaacggtcggtttgtttaccttagtccagaagttggtggacaaattgccttagttgaagcagctgccaacataattgccagtggagctgagccgttagcaattactgactgcttaaattatggtgacccaactgatccagaaattttctgggaacttcatcaatctgttcaagggatggctgatgcttgccgtgaatttaatactccggttatttctgggaatgtttctttatataacgaaaacaatgggcaagcaattcatccgacgccgatggttggaatggttggtctaattaaaaatattgatcgcgtaattccttcgtttgtccaatacccgggagataaggtttatctagtgggccaaactcgtgatgattatgcggggtctgagttgcaaaaaatgatgaccggcgatattagcggaattgttaagtcatttgaccttcaccatgttcatcaatatatgcaacgtttactgacgacgatggagaacggccttgtttccagtgcccatgatttgagtgaaggtggtctcggagtagccttagcagaaacggtcttcaaaactgatttagggttgaaagttgactttgctgatcagccagcagttcgcctgtttagtgagactcctggaagatttatcgtgacggttgctcctgaaaaggcaaccgaattcgaacaggcattaggaaaagatgcacacctaattggagaagttacaaatagccactggttaatggttaaactggcaaatggtgaactcaatgaaagtgttgcaaaattacaaaaaacatgggaggaggcaattccgtgccaactgaaatcaaaggattaaatgaagaatgtggggtctttggggtttttgatgcggctaacgctagtcaattaacctattacggcctgcatactcttcaacatcgcggccaagaaggagccggtattgtctcaactgatggaacggaactttatcagcaccgtgaccgaggattgttggcgaaagtgtttgctgatccggctgagcttaaacgattaaaaggaaacgctgcgattggccatgtgcgttatgggacaagtggacataactcgatttccaatgttcaacccttcctttttcactttcatgatggcgccgttgcccttgcccataatggtaatttaactaatgctgttacccttcgtcgtgaattggaaaatgaaggggcagttttccagtcagattctgatacggaaattttaattcaccttatccggaaatatattaatgaaggttttattcctgctttgaagaaaagcctcaaccttgtccatggtggatttgcctacctattactgcaaaaagatcggttgattgcggctttggatcctaatgggattcgtcctttatgtattggaaggttagaaaatggtgcttatgttgttgctagtgagacttgtgctttagatattattagtgctcaatttgtgcgtgatgttttgccaggagaattaatagttattgataaaaatgggttacatattgaccattacactacccaaactcagctggcaatttgctcaatggagtatatctattttgcccgtcctgattctattattcatggggtaacggtacataatgcgcggaaacgaatgggaaagttattagcaaaggaacatccggttgatgctgatatggtgattggagtacctaactcatcgttgtctgctgctagtggatatgctgaagaaagtggccttccatatgaaatggggttaataaagagccaatatgttgcgcgaacgtttattcaaccaactcaagagttacgggagttaggcgttcatatgaaactgtcagctgtccgcggagttgtaaaaggaaaaagagtggtagtagtcgacgattcgattgtgcgcggaacaacttctaagcagattgtccaaatgctaaaaagagctggggctaaagaaattcatatgcttatttcctcaccaccatttaagtttccgtgtttctatgggattgacgtatcaacgcgttcagaactgatggctgctcattactccattgaagaaatgcggcagttaattggtgcagattctcttaactttttgagtattgatagtttaatcaaagcaattaacgtaccagatgcaggagatgctcctaatggtggacttaccgtggcttattttgatgggaagtacccaacgccactttatgattatgaagaagggtacttaaagtcgttaagcgaacaagagcgattagcaagaaaggggtaagaggatgagtcgttatcaagatgcaggggtggatgtaaatgccgggtacgaacttgttcaccgtattaaagatgcagtcaaatcaactgatcgcccaggggtgattgggggaattggcagctttggggggatgtttgacttagaaaaattacaggtacggcatccggtccttgtctctggcactgatggtgtgggaacgaaactcttaattgcccaacaaatgaataagcacgatacaatcgggatcgatgttgtcgcaatgtgcgttaatgatgtcttggcgcagggagcggaaccaataacatttctcgactacattgcgaccggccataatgatccggctaagatggcagcgattgttagcggagtagcgactggttgccgagaagctggagccgctttaattggtggagaaacagcagaaatgccagatatgtatgcagccaatgagtatgacctggcaggaacagtaacagggatagcagaaaaagaagaacttcttaccgctgctggaccgcaaaaaggtgatattttacttggcctcccatcaagtggcttgcattccaatggcttttcccttgtccggcagatcttatttaaggataatcacgtcaaattaactgatcgcccagaagccttgagaggaaagacggtaggagaaacgatcctgactcctactaggatttatgttcaagcggtcttgccattagtccatcgcaaattggttcatgggattagccatattactggtggaggattgattgaaaatgttccccggatgttagaagataacttgcaagcggtgattgatcctggtcggtggccacagcttccggtctttgactatttgcgggtgctaggaggccttactaaggaagattgtttcgaagcatttaacatgggaataggaatggtcttagcagtagcaccagatcaagtagcacaagttcaagagatactatcaaataaaaacatgacaagttatcaaattggttatcttcgtcattgtttaccagatacaaaaaagattgttatcaagtgagggttgtaaatgagagtcgcaattttagcatcaggaaacggaacgaattttgaagtcttagcacagcacttcaaaaataatgatcttcctggtgaattagcattattattctgtaatcatccagatgctccggtaatgaaaagagctgcccgactggggattccggcagaaagctttacggtcaaatcttgtgggggaaaacaggaatacgaggaaaaattattgggagtgttgaaaaagtatcaaattgactttattgcccttgctggttatttacgagtaattgggcccactattttggatcattatgctcaccaaattattaaccttcatccagcatggttgccagaatatccgggactacattcgattgaacgggcatttgctgatcaacaagcccagacaggcgtcaccgtacactatattgatgcgggactcgattccggcccaattatcgcccaggaacacgtcccaattttaccaactgatactattgaaaccttagaagcacgggttcatgaaactgagcaccggttatatcctgaagcactaaagcaggcattagaaaaggagcaacattaaattatgaaaagagcattagtaagcgtttctgataagcaaaacctggtcccattcgttaaaggattagttgaaaatggttttgaaattatctcgactggtgggacgaagcgggttttagatgaagcgggaattgaaacaattgggattgaggatgttactcattttccggaaattcttgatggccgcgtaaagactcttaacccatacgtccatgggggactattggctcgccgggacttaccggaacacatggcgaccctcgaaaaacttaatattacgccaatcgatttagtctgtgttaatctttatccatttaaagagacgatcgaaaagccgggagtggaattagccgatgcaattgaaaatattgatattggtggtcctagcatggtccgctcagctgctaaaaactatcatgatgtaacaatcgtggtggaccaagccgattacgatgaagtcttagcccaaatcaaagaagatggtgaaacatcattagcaactcgagcacgcttagcagcgaaagcctttcgtcatacggcagcctatgattccctcatctctcaatacctcacaaaacagacagggcttgaagatccagaaaaattaactttaagctgggatttaaaagaaacaatgcgttatggtgaaaatagtcaccaaaaggcttggttatatgaagacgcgcttcctaaggctttttcagttttacaggctaaacaattacatggtaagaagctttcctacaataatattaaagatgctgatgaagcattacggtgcattcgcgaatttgatgaaccaacagttgtagcgatgaaacatatgaacccatgtggcattggccgaggggatagtttggttcaagcttgggatcgtgcctatgaagctgaccctgtttctatttttgggggagtgattgctcttaatcggcaagttgatttagctaccgccgagaaaatgcacaaaatctttttagaaattgtcattgcacccggctttgacgatgatgcatttgagttattggcaaagaagaaaaatattcgtttgttgagtctggactttagtaagaaggatgaaccaactaaacatgaagttgtttcagtgatgggtggaatgttgttgcaggaacaagacacgcttaaggaagattaccacgactggcaatgtgttactgaaaagcaaccaacagaggaacagcttaagacattaatgtttgcctggaaagcagttaagcatgccaaatcaaatgcgattgtcttagcaaatgatgagcggacattaggggtcggagaaggtcaacctaaccgaattgattcattgaaaattgccgtaaaacatgctggcgaggcgattgatgaccggacagtgatggcatcggatgctttcttcccatttggtgattgtgttgaatatgcgggtcaaaatggcattaaggcgattgttcagccaggaggatcaattcgcgatcaagaatcaattgagatggcaaataagtacggaattgcaatggtcacaacaggcattcgtcatttccgccattaaagctaggagggtatcatggaaaagcaggtcaacgtattagttgtaggtgaaggcggtcgtgaatttgccgtggcgaaaaaattacaagaaagtccccgtgttaagcaagtttattgtgcgccaggcaacgtggggatgtcgactgtaggagtagttcccattgcaattgcggaaactgactttgctaagctgattcaatttgctaaagaacataatgtcgcgtggacattcgtgggccctgaggattgcttggttgatgggattgttgatgaatttaaggccgctggattaaaggtttttggtcctgatgcgcgggctgcccaattagaaggctcgaaagactatgcccttaattttatgaataattatcacgttcccactgcccgccatgcgacatatagggatcaaacagcagcgattaataacgttgggcaatttggctttccagtagtaattaaagaaaatggtttagctggaggaaaaggggttgtcattgcaaaagatcgtgcagaagcaattaagacaatcaaagaaatgtttgtcaatggtcaggcgcgccttgtgattgaagaatgtctatcaggtcctgaatattcaatgtttgttttgattagtaatggccactaccgaattttgcccatggctcaagaccacaagcgagcatttgatgacgataaaggtcctaatactggggggatgggggcttatagtcccttgccacaactttcctcagccgttcgtcaacagatgattgatgaagtacttaagccaacaattgatggtttggtggctggcgagtatcactaccatgggattttatatattggccttattttgactgataatggtccaaaagtgattgaatataatgttcgtctaggtgatccagagacccaggtgattttgccccgcatgaaaaccgacttgttcgaacttgtagacgcagcaattaatgatcgaccattaccagaagttgaagaaaatgaagatgcttgttttggtgttgttttggcatcgaaagggtatccaactaagccaatccacggccaaaagctgggaacatttccagttgatcctaatgttactattgattacgcaaatgttgctggaacaattaatgacttaaaaggtgcaggtgggcgtttgctaatggtgatcgggaaagatgattctcttcaaaaagcccgcgatcacgtttatggctacttgcgccagcttgatgaacctgaatgtttttatcgtcatgatattggtgcaaaagctggactgcaataatttcttcatcactattggcatttgcaggggaatggattaaaataatatggtaatgctgtttatagcgattttaagaagaaagaggtcaattgaacatggctaaattagtattaattcgtcacggtcaaagtgaatggaacttatctaaccaatttactggttgggttgatgttgatttaagtgaaaagggtgttgaacaagcaaagaatgctggtaaagcccttaaggaacacggcattgaatttgactacgcatacacttctgttttgaagcgtgctatcaagactttgcactatgctcttgaagaatgtgaccaattatggatccctgaatacaagacttggcgtttaaacgaacgtcactatggtgcacttcaaggccacaacaagcaaaaggccgctgaaaagtatggtgacgaacaagttcacatttggcgtcgttcatacgatgtattacctccattgctaagcgctgacgatgaaggttctgctgcaaaggatcgtcgttacgctaacttagacccacgtgctattcctggtggtgaaaacttaaaggttactttggaacgtgttattccattatggcaagatgaaattgcgccaaagcttttggacaacaagaacgttatcatcgctgcccacggtaactctcttcgtgcattgagcaagtacatcgaaaacatttctgatgaagacatcatgaaccttgaaatggctactggtcaaccggttgtttacgacttcgatgacaagcttaacgtattaagcaaggaaaagtactaaaataaacttacgatattaaatttgaagaggcgggaaagttagattcctaacgccttttttttgtagcttttttgaagaaatgttgaagatattgatgaataaattgagcttatagtgagttgtggtatgattaacatcagaatctaataaggtggagagaatttaaatgaaaatggaaaaacaacgaacactcccaatgaaggaattttacctttcattgaaacaactggtaaagcctaactatttaaaggcaatgtggccagttgcaggggtatcaattatttttattgctttagcagcgatcttagcactccttaattcaaacattgctgcctcattgagtatgacgatgatgatggtaatgtacgggatggcttccccggttgcaatcttgttctcattattagaaattgtagggattgtcgcaattattgctgcgttagccttcttctatactttctttgcagttgctacccaatatacatatcaggataagatggctcatccagaacaaccagttagtgctggatcaatatggatgcactataagcacttgcgaaaaaaccaagtatggcggattattctttacattggattgtttactttcttatggagtttgcccctcaacattgttaacgcattactcttgccacatttatccggagtagccgctgtttatacggggtgggcaattcgcatccttaatgatattgtcgtattatggaagagtattgaatattctcaatcatacttcctttatcgtgaaaagcagccacaattccttagccaatcaatgcgttatgctttaactgctagtcggcggttcatgactggtcgaaagtggaactactttgcaattctgtttattttagaattccttccaatgtttatctggactttaatttttggtggattggcattttacggcgtttatacggcaacttatgtccttacttatatcggaatcgttttagtggttgttggtatttcctgctaccttccagtggtatatgcaattcttgctttgtactacaacaaggctcgagcaggaatggaaatggatgtgctttttaaggatacttttaagccagtagccgaattaaccggtgaagcttatgttcatgaagtatatgtagaaaaacaaccaaaagaacaaccatcaccaactgttaagcgtgatgatgaaaagaaacacgaagcaaaaaaagatgaatagtgaagcgaaaagctgaagggtaacgaaaactcttcagcttttttgtattttaaatacttcttgacagtaatcattaattccatgtacaatgacggcaataaccaaagatgaagaagtaatcttagtagtaagcggttggacatttaggaagcaagtggtaactgtaaactttgccaatgccgttatacgaattacacttacggagtctttcagtatttgaacggatcgtctcgttatcgactagagtggtagctatttagctgcaaatcaaggtggtaacgcggtaaatcgtccctgacttcattatttgaagttggggattttttgtatccgagaaatttatggaggtaaacatggatattcttaatgaactagaatggcgtggggctattaaccaagttacagacgaagaaggcctacgcaaattaacatcagaagataaaattgctctttactgtggaactgatccaaccggggatagtcttcatattggacacttaattccatttatgattttgaaacgatttcaattagctggccaccatccagtaattattattgggggaggaactggtgcaattggtgatccatccggtcgaaagtcagaacggcaacttcaaaccatggatcaagttcaccacaacgaagaagcattaactgctcaaatgaagaagttgttcggcactgaaaacttcacgattgtaaataactatgaatggttatcaaagatcagcttgttagactttcttcgtgactacggtaaactatttaatatcaacaccatgttaaataaggaagtagtagcaagccggttagatgctggtatttcatttactgagttcacttatcaaattcttcaatcagtcgatttccttcatctttaccgtcacaatgatgtgcaattacagattggcggctccgatcaatggggaaatatcactgccggaattgatttgattcataaggttgaaggaccagatactaaggtttacggacttactattccattaatgctcaaagctgatggaactaaatttggaaagaccgcgggtggtgcaatttggcttgatccagaaaagacctctccatacgaattttatcaattctggattaaccaagatgaccgtgacgttattaaatacttgaagtacttcactttcttatcaaaggaagaaattgatgacttggcagaaaaagttgagaaggaaccatggaagcgagaggctcaacgtcgcttagcccaagaagtaactaaatttgttcatggccaagaagcagttgaagaagcagaacggattagtaaagcattgttctctggggatgttactgacctttctgttgcagaaattgaacaaggctttaagaatatgccttcagtagatgtagaaaataagaaagaaaatattgttttatggttaaccgataatggcattgaatcttcacgtcgccaagctcggcaagatgtatcgagtggagctatcaggattaatggggaaaaagttgatgatgttgacgccgagattgatccccaagcacattttgatggtaagtttgtgattgttcgaaagggtaagaagcactattacttagctcgcgtaaaataaattagaccaattgttagcaaatacgttcttaaaagatgatttaagggcgtattttttatttttagatataaaaaaacaaattttttctatttcgaataataaaaaggttcaggtttaaaaaataaattaaaaaagttgaaaaaaggtgttgacgaaagaatgaaatccatgtatagtagttatcgttgtcaaaacagctaagtgctgttgagatggtttaacaaaaaagttaaaataattgttgacatcgacttggcaacatgatatattaataaagttgctgattgagttatcgatcaaaagaaattaaaaaataatttaaaatttcttcttgacaagttaatctgatacatgatataatgaaattgttgattggctgcttaattaaccgacaggtagacctttgaaaactgaacaaagtttcgacgaatcaaatgtgtagggtcttcaatcacgatgtgatttgaagcaaaacatttgcgaagtcaattcgcttaataacaaagataattgagagctattcaagttcttatatattttatatgagagtttgatcctggctcaggatgaacgccggcggtgtgcctaatacatgcaagtcgtacgcactggcccaactgattgatggtgcttgcacctgattgacgatggattaccagtgagtggcggacgggtgagtaacacgtaggtaacctgccccggagcgggggataacatttggaaacagatgctaataccgcataacaacaaaagccacatggcttttgtttgaaagatggctttggctatcactctgggatggacctgcggtgcattagctagttggtaaggtaacggcttaccaaggcgatgatgcatagccgagttgagagactgatcggccacaatggaactgagacacggtccatactcctacgggaggcagcagtagggaatcttccacaatgggcgcaagcctgatggagcaacaccgcgtgagtgaagaagggtttcggctcgtaaagctctgttgttggagaagaacgtgcgtgagagtaactgttcacgcagtgacggtatccaaccagaaagtcacggctaactacgtgccagcagccgcggtaatacgtaggtggcaagcgttatccggatttattgggcgtaaagcgagcgcaggcggttgcttaggtctgatgtgaaagccttcggcttaaccgaagaagtgcatcggaaaccgggcgacttgagtgcagaagaggacagtggaactccatgtgtagcggtggaatgcgtagatatatggaagaacaccagtggcgaaggcggctgtctggtctgcaactgacgctgaggctcgaaagcatgggtagcgaacaggattagataccctggtagtccatgccgtaaacgatgagtgctaggtgttggagggtttccgcccttcagtgccggagctaacgcattaagcactccgcctggggagtacgaccgcaaggttgaaactcaaaggaattgacgggggcccgcacaagcggtggagcatgtggtttaattcgaagctacgcgaagaaccttaccaggtcttgacatcttgcgctaaccttagagataaggcgttcccttcggggacgcaatgacaggtggtgcatggtcgtcgtcagctcgtgtcgtgagatgttgggttaagtcccgcaacgagcgcaacccttgttactagttgccagcattaagttgggcactctagtgagactgccggtgacaaaccggaggaaggtggggacgacgtcagatcatcatgccccttatgacctgggctacacacgtgctacaatggacggtacaacgagtcgcaagctcgcgagagtaagctaatctcttaaagccgttctcagttcggactgtaggctgcaactcgcctacacgaagtcggaatcgctagtaatcgcggatcagcatgccgcggtgaatacgttcccgggccttgtacacaccgcccgtcacaccatgggagtttgtaacgcccaaagtcggtggcctaacctttatggagggagccgcctaaggcgggacagatgactggggtgaagtcgtaacaaggtagccgtaggagaacctgcggctggatcacctcctttctaaggaataaaacggaacctacacatcgaagaaactttgtttagttttgaggggtttaccctcagagcttgtactttgaaaactaaatactatctaatttctttattaacaaaacaataaaccgagaacaccgcgttatttgagttttaattaacgaattataatcgctaactcaattaatcagacaatctttgattgtttaggttaagttatgaagggcgcatggtgaatgccttggtactaggagccgatgaaggacgggactaacaccgatatgcttcggggagcggtaagtacgctttgatccggagatttccgaatggggcaacccaatcagcttagtcgctgattacttgactagtgaatacatagctagcaagaggtagacgcagtgaactgaaacatcttagtagctgcaggaagagaaagaaacatcgattccctgagtagcggcgagcgaaaagggaagagcccaaaccaacaagcttgcttgttggggttgtaggactgaatattagagttaccaaagtgcgacgtagtcgcaacagttgggaagctgtgccatagagggtgagagccccgtagacgaaacgtcacactctctgttcaggatcctgagtacggcgggacacgtgaaaccccgtcggaacccgcgaggaccatctcgcaaggctaaatactccctagtgaccgatagtgaaccagtaccgtgagggaaaggtgaaaagcaccccggaaggggagtgaaatagttcctgaaaccatgtgcctacaagctgtcggagcccgttaatgggtgacggcgtgcctcttgcagaatgaaccggcgagttacgattacatgcaaggttaaggtggaaaaaccggagccgtagcgaaagcgagtcttaaatgggcgtaaaaagtatgtagttgtagacccgaaaccaggtgacctacccatgtccaggttgaaggtgcggtaaagcgcactggaggaccgaacccgtgtcagttgaaaatggctgggatgaggtgtgggtagcggtgaaattccaaacgaacttggagatagctggttctctccgaaatctctttagggggagccttgaggtaaagaatcgtggaggtagagctactgtttggacaaggggcccgtcatgggttaccaacttcagataaactccgaatgccatcgatttatactcaggagtcagacgatgagtgataagatccaccgtcgaaaggggaacagcccagatcaccagttaaggtccctaaatatatgctaagtggaaaaggatgtggagttgcatagacaactaggatgttggcttagaagcagccaccatttaaagagtgcgtaatagctcactagtcgagtgatcctgcgccgaaaatgtaccggggctaagcatattaccgaaactgtggatgtgcactatgtgcacgtgataggagagcgttctaagggcggcgaagtcagaccgtgaggactggtggagcgcttagaagtgagaatgccggtatgagtagcgaaagacaggtgagaatcctgtccaccgaatgactaaggtttcctggggaaggctcgtcctcccagggtaagtcgggacctaagccgaggccgagaggcgtaggcgatggataacaggttgagattcctgtaccagttaactgcgtttgacgatggagggacgcaggaggctaagcaaaccgtacgactggaagagtacggccaagcagtaagtcaggatgtgagtcaaatgtttacatccgcgttgacaagctgtgatggggagcgaaattaaagtagcgaagttgccgatgtcacactgccgagaaaagcttctaaggagtagttaactgcccgtaccgcaaaccgacacaggtagtcgaggagagaatcctaaggtgagcgagagaactctcgttaaggaactcggcaaaatgaccccgtaacttcgggagaaggggtgctggccgcaaggccagccgcagtgaataggcccaggcgactgtttatcaaaaacacaggtttctgcaaaatcgtaagatgaagtataggggctgacgcctgcccggtgctggaaggttaaaaggatgggttagcttcggcgaagctcagaattgaagccccagtaaacggcggccgtaactataacggtcctaaggtagcgaaattccttgtcgggtaagttccgacccgcacgaaaggcgtaacgatctgggcgctgtctcaacgagagactcggtgaaattgaaatccctgtgaagatgcagggtacccgcgacaggacggaaagaccccatggagctttactgtagcttgatattgagtgtttgtactgcttgtacaggataggtaggagccgtagaagtcgggacgctagtttcgacagaggcgctggtgggatactacccttgcaatatgaccactctaacccgcagcactgaacgtgctgggagacagtgtcaggtgggcagtttgactggggcggtcgcctcctaaaaggtaacggaggcgcccaaaggttcgctcagtatggttggaaatcatgcgcagagtgtaaaggcacaagcgagcttgactgcgagacagacaggtcgagcagggacgaaagtcgggcttagtgatccggtggttccgtatggaagggccatcgctcaacggataaaagctaccctggggataacaggcttatctcccccaagagtccacatcgacggggaggtttggcacctcgatgtcggctcatcgcatcctggggctgtagtcggtcccaagggttgggctgttcgcccattaaagcggtacgcgagctgggttcagaacgtcgtgagacagttcggtccctatccgtcgcgggcgtaggaaatttgagaggacctgtccttagtacgagaggaccgggatggacataccgctggtgtaccagttgttccgccaggagcaccgctgggtagctatgtatggacgagataaacgctgaaagcatctaagtgtgaaactcgcctcgagatgagatttcccatttccttcgggaaagtaagacccctcagagatgatgaggtagataggatggaagtggaagtgccgtgaggcatggagcggaccattactaatcggtcgaggacttaaccaaggagcggtaaggtttattggaagagaatagataggatttagttttgagagcacaagctctcgtccgaagggacaaagagtgtggtgatgatggcttgaaggatacacctgttcccatgccgaacacagaagttaagcttcaacacgccgaaagtagttgggggatcgctccctgcgaggataggacgttgccatgcgatcaaaacgtgaaccggttaaacgattcgcgtcttttctttaataatagtttctggtataattaattaggaattgttattatgctgacttagctcagttggcagagcacgtcactagtaatgatgaggtcggaggttcgaatcctctagtcagcataattaaaacttacaaagtttattaatccttgatatatcaacgttttacgaagatgtattagggattatttttgtttatttaagaatgttatgcacacggctgtgcacacaaaataatcgtgtgcatgagcttgcatcggagaagtgcgtaaaccattgatatattaggctttatagattattttttgtgtgcatttaactgcttttgctatgatatagtgatgaggtcggatattcgaatcttctagtcagcactagatagtgtaggatagcctattataacgctgtttatggacgttataataggctattttatatacaaatatgttatcagtttctcacttttttctcacgtgaacactaaatggttgttttgaatttttgagaagtagcgctaatgcagttatatcaaccatttaagctgttagagtgtgtgaaaaagtgtgaaatgaagattaaaagtatatcgttaaaataatataaataattttagatattaagtatattgttttcttcagaaaatatagagaaaaattcaataagatgaagggctttgattttctaattaaagccttttaattataggttgaagaagaaagtttttaggatcaaatttggatagtatataaccatttttgaatattattcttatttaagcagatcacaatatgttataaaattaaaataagggtatgttatgagtgcaaataggagtaaaaaatggttaataaaaaagagttgtctgaagaagatgtaaaaacaagatatattactcctgctattgaggacaaaggatggactcctcaagactggcgtatggagtatgagtacacggatggaagaattactgttgttaacaatacaaccaaacgtggagaacgtaagaaaatagattatctattaaattatcatgaaaatgttcctttggctattattgaagctaaagacttgaaacatacatacgatcatggtatgcagcaaggaattgactatgctaaagggttaaaacatgctgaatccttacaagtaccttttgtgtatgctagtaatggagaggcatttcttgaacatgatatgctaacgggtaaagaacgtaagttagcaatgaatgaatttccaactaaagaagaattatgggaacggtttaagcaagaaaagggattaacccctaaacagatcaaagtaattaatgaaccatattattcaacacgtgaatcaagaaagccaaggtattaccaaagaattgcaattaaccggtcagtgaacgcaattgctaatggtcaacgtcgggtaatgttagttatggctactggaactggaaagacttttactgcctttcagatagtttatcggttattacaatctgggattaagaagcgtgtattataccttgctgatcgtaatattctggttgatcaagcaatgacagatgattttagcccgttgctaagtaaagcaactaaagtacgaaatggaaaaatggatagttcttaccaaattcattttgctttatatcaacaattagcaggtcgtgaagaagatgctgggcatgaacctttccgtcaattcaaacgtgatttctttgatttagtagtgattgacgaagcccatcgtggctccgctaaaaaggacagtcagtggagaaaaatattagattactttgatggccctaatgtgacccattttggtatgactgctacacctaaaaatgagaagggtgcatctaatattgattattttggtgaacctatctatacatattccttgaaacagggaattgatgatgggttcttagcaccatatcgagttattcgggtcaactttgatgttgatattaatggcttccggcctactaaaggtgaaaaagacgccaatggccaagtaatagaggatcgtcagtatacatcaaaggactttgatcgtacaatgataattgctgatcggactaagaaagtggctaaatatattagcgattatttgaagaaaaatcatgaacgatttaataaaacaattattttctgcgaagatattgatcacgctgaacgaatgcgaacagctttagtaaatgaaaatgctgacttagtacagcagaatcctaagtatgtcatgaagataactggtgatgataaggttggtaagggtcaattaagtaattttgaagatgttactagtaaataccctgtcctagttactacatctaagttattaactactggggttaatgtaaaaacttgtaagttaatcgttttagaccaaaatattaattcaatgactgaatttaaacagattattggtcgtggtactcggttagatgaagcacatggtaaaacattttttacgattatggactttaagggtgcttcacgtctgtttgctgacccaaagtttgatggtgaacctgaagataccgttatagatgatgatggtcaaggcggagtggactttaacaatgacgataagaagacagataaaaaagaggagtctgatatcggtgataaagttagtgaaggtaggacaaaatacttagtaaataacaaacaggttcaaatcgtcaactctcaggcagaatatttggacgccgatggtaaattaattactacatcattgcgtgactacactaaaaagaacgtgcttggacagtatgctactttggataaatttattgaagagtggcgtaaatctgataacaagcaagagcttttaaatgatatggaaaatcatggtattttctacaaagaaattattagtgatgagaatctaaaagatttagatccgttcgatttactagttcacttggcttataaccaaaagccattaagtaagtcagagcgtgttgctaatgtaaaaaagtctggattattagacaagtatcagggtgaagcaagaaccattcttgaagcgttacttgataagtacaaaaacgatggaattgaagaacttgaaagtcgcaagacgttaagcttaccagagtttgaacagtatggtgggccagttaagattattctgaaagtatttggtggtaaaaaaaactatcaaaatgcagtttcagaaatgaaagagaaaatttacagttaggattaggtggcaatggcgaatacacaatttgtaaaacgaattcaggatattatgcggaacgatccggggatcaatggtgatgcccagcggattgaacagctatcatggatcttgtttctaaaggtctatgatgatcgagaaatgatatgggaattagacgatgatgaatatacatcaattattcctgatgggctacattggcgcgagtgggcacaagataataaggatggacaaagccttacgggtgatgagttactagactttgttaataatcggttattaccttccttaaagaaaattacagttacttctgatactccaattagtaagtcgattgtaaaagatgcttttattgatgctaataattatatgaaaaatgggattcttttacgccaagttatcaacgtggttaatgatgttgactttactgatcctaaggatcgtcatttatttaatgatatttatgaaggtattctaaaagaactccaaagtgctggtaattctggggaattctacacgccacgagctttaactgattttattgctaagacattgcagcctaagttaggtgaacgagttgccgatttggcatgtggtactggcgggttcctagttagcaccttaaatatcctgaataagcaagtaaagacggttgaagatcgtgagaattataaccgcgcagttttcggtatagaaaaaaagggacaaccatatatattagcggttactaaccttttgcttcatgacgttgataatcctgacattatccatggaaattcattagaaaaacgggtcgcagattatactgacaaagataaatttgatgttatcatgatgaatccgccatttggtgggtctgaacttcctgttattaagcagaattttccaactgatttacaaagtagtgaaacggctgatctatttttagccttaatcatgtatcgcttgaaggataatggtcgagttggtgtaatcttgcctgacggattcttattcggtaatgacgatgccaagattaaccttaagaaacggatgttaaatgactttaatttgcataccattattcgcttacctggtagtatctttagtccttatacatcaattgatactaatattctcttctttgacaagactggtccaactaagcaaacctggttctatcgtcttgatatgccagaaggatacaaacatttctcaaaaactcgaccgatgaaattagagcatttcaagccagttgaagaatggtggaataatcgtcatgaaattcaagatgatgccggtaattacaagtccaaggcttatactccacaagaattagctgacaataactataattttgatctgtgtggattcccaacagaaactgaagaagtcttaccaccagaagagttaatgggtaagtataaagaagagcgggcagaactaaatactaagattgatcagacactcagtaagattaaagcattgttagaggaggatgattaaatgactcctgaacaattgcgggcttctattctccaacaggcaatggaaggcaaattggttaaacaagaccccaatgacgaacctgctagtgaattactagaaaaaattaaagcagaaaaagaacaactggttaaagcaaaaaaaattaagaagactaaagccttacctaaaattacggaagacgagaaaccgtttgatattcctgaaaattgggaatgggttagattaggtactgtttttaatttacaagcaggaaagaatagaaaagcttctacaattaatgaaattaaaactgtagattatgattatccttgttttggtggaaatggcataagaggttatgtatcagactttaatagagaaggaaaatatgcattaataggtagacaaggagctttatgtggaaacataaattttgctaagggaaaattttatgctacagaacatgctgtcgttgtagaaatatttgctggtacaaattataaatggagtggatattttttaaaggctctcaatttgaatcaatattcaacagcaacagctcaaccaggcctatctgttactaaaattaaccgtgtattaattccattaccgccattaaaagagcaattgagaatagtagcaaagattgaaaagttaatgccattaattgatgagtacgcaaaagcatataatcgactaaaagcaattgatgatgattttaacgataagatgaagcaatccatcttacaatatgcgatggagggcaagctagttaagcaagatcccgatgatgaaccggctagtgaattgctgaagaaaataaaggatgagaaaaaacaattagttaaagaaaagaagattaagcggagcaaatcattgcctagaatttctgaagatgaaaaattattcgacattcctgaaaattgggaatgggtaagattaactgaagttggatcctggggagcaggtgcaacaccatctcgatcgcatcccgaatattataatggtggaattccttggctaaaaacaggtgatttaaatgatggggttattagctctacttctgagacaatatctcaagcaggtgcagacaattcttctgtaagatttaaccaaccagggaatattcttatagcaatgtatggcgctactattggaaaattaggaatagcaggaatttcgttaactactaatcaagcatgctgtggatgtaagacttttgatggaatatataattggtatctcttttattatttattagcaatgcgacctcttctaattgatcaaggatcagggggagctcagccaaatatttctaaaactaaaattgaaaagtttccttttgcactaccaccatttgaggagcaaaagcgtattgtaactaaaattgaaaaactaatgcctttattggttgagtaataaatctataaggaaaaattaacaggtactgcataaagtctgacgtgtacccttaaagttggaacctgtatgttcttgctttaaaattgaataaatatttttctaggcaactagattctgctcatattgaagtggagtttggttgcctagttttgtctgaatacggcgttcgttgtaaaagtgaatccattcattaattgcttggcttaattcttcttgattgcgataactggtatcaggaccgatttctgctttcagtttactaaagactgtttcacaggcagcgttatccagacaggttgctcgatgcgacatgctttgcctaatgtttccctgacgaagtagtttgcgccaagcacgatgttgatagtgccagccttgatcagtatgtaaagttaattggtatcctgtatgaggtaactgcttaagtaattgctggagtggatctaatgcgaattgaagatttggatgttgactgattgaccaagtgagaagctggttagttgccaagtccttaataatttctaagtacacttttcgcccatcatgagcctttaattctgtaatgtcacaaaccattttctgatatttacggttactcataaaacgccgatttagcttattcttagctttcttgccatttggtcccttagaggaatcatacttacggactcgccgattatatttgatacatttaagtcccatttcatgcattaagcgctgaatgcgcttatgattaggtgtctttttaccaattaagcgatagtagtctcgaatttgagtgcttaaacggcgtacgccgtattcagcttggtagtagttaaagagacctttaataacggctttaagttcttcttcatcctcatccggatgttcaaaccgattttgccaatactgataggttgacatggaaatgggaagtgcatcgatcaaatcctttaataagtatttagccttgaggtcataaattacttgtgcgagttcttttttggatgctttctcaaggctgtcaatttttttgaggcatcgagttgtatctttaacaataagttttctctttgtaaagcttggttctgtttttggagctgaagaagcttgtcttgattcttgtcgtgtcgtttgaccatttttaggtttccttccccgacgcaatctcagtaaagcctgtggcccttgcttgttatagagacattcccactgatacactgaacctggggaacgatatccaaagtgaatacaagtttctgaaattgacgtcaaattttcttgtttccactttacctaaccgaaaatccccagttactttgggtggattgagtaatggtcctttaccaaatcttgcataaattcccacccaaattttgaaatcatgttcagcaatcccgtatttatgcctaactgatgctaaagtaacattaccgttggcatattcttcaacagctttaagtttagttttaacgctaattttggtcatataaaatacccccagagttgatttccaactctgggggtacacgtcagaggattatcctcaaggcctgtttttatattgagagaattctaagacagtagtatattgatattaaaatttaatgagaaagaagatgggagagtagtggctaaggagagaaaagaaacgatctttacgaaggatattgttttagtaatggcggcttcattcttcttcatttttagtaatatgtattgtaatccgctgattaatggctatgctcaggaattaggagcctccagtgctttcgccggaattattgtggggatgatgagtattgttgcgatgtttcttcgtccagttgcgggaaacatgacggatcatttttcaaagtatacgctggcgtttctcggtggtgttttaagctttattggggttatgggttacgttattacccccaatagcggcctgctcctgttctttcgactaattaacgggttagggtatgttctttgtacagtttgcatgacaacctggttatcatatttagtcccgtttaatcatgtcggtgaggcaatgagtttttatggattaatgaatgctttggcgatggcttttgcaccagcggtatcgatcaacctttaccgcgtgatcggttaccgatatgcaatcattatttctgcattagcatcattaatgatgattattactgtgcagtttattgataataaagctaaaccagatcctcaaccgaaaaaagaaaagactaagggcttccatctgaaaattattcagaaggattcgttgccaattgccttcttgactgcattgtttgctattccatactttgcaactcaggcagatattgttacctatacggaacaacgtcatttgccaattgcagttggctcttacttcttaatttatgcggttgttttgttaggaattcggcttttcttgcggaaccaatttgatacggttaagttcggaccatggctgattattagtacaatcgcaacggtcttttatttaattatgttggcagtaatgcatactaactttgaaatggctcttgccgcagcagggatggcctttggatacggattgatttattcagtttgtcagtcaactgcgatgatgttggcaccttctaatgaacggggcctggcaagttcaacattcttcttagggttggatgttgggatgaccctcggacctgttcttggtggggtcattgattcaacaatgccagtaaaatggttctatccagtaatgctagtaattattccatttattttgctaatttatgtattcaatcggcgcaagttaaatagtgcagtacaaaatcattaaataatgtcaaaactgggaaccaactcgagccttgttcttaataagggttcaggttgattcccagcttttttattatcagaattttagtttgttctacatgaaacacatttgatattctagtcaggtttaacgatttcttgtttccagtggtggaggtgttgttttgtgatcacacaaaggccatcttcacctaatgccttcattttatcggtacacataatcttaatatcaggattatcggcaacctgttgttcaccccagtaatttaagtaacggagggcagcataaagtttttccccttcagcggttaaacgatattcaacgtgtggaggaatggtattgaaactcttccggtcaacaattcctgcatcgacaagttctcgtagctgatcgctaagaactttgtgggaagttcctaattgcttcactaattctccggttcggcggggatgaccggcaagaaggtaaagaatgaccggcttccatttaccaccaatgattgatagggcatagtctgcaccggtattaaacattttagccataaaaatcctcccttcagtactttcattatatatgaaaagagtgaagagaggagtagagttattatttaattaacttaaagacttgatcttctggaaggtaatctttatcaccagctggagattcgattgagccaaatggcatttctgcgcgtaacttccatgattcaggaagatcgaatgcttcatgaatagcatcatcaattagcggattgtagtgttgcagactagcgccaaggttgttttctgccaaggcagtccagacagcttgttgagcaccaccaattgcttgctcagaccaatccgcgaagttagcggcatagctagggaattgttcttctaagttatgaacaatatcagtatcggttaagtaaaggattgtcccgaaacctgcacggaatgttgcgatctttgctttagttttggcaaaagcagcaggatcctttacaatcttctggagagtttcttcaacaatatcccaaactttgtcagagttcttgccaaaaagaacaactgcacggacagtttggctgttaaaggcacttggagagttacggactgtttcctttaccaggttaaaaatttcttctgggcttgttgttatgttatcgccaagagcataaatggaacgacgcttggcactgagttcattaaattttgattgcattgtgagttcctccttaatcaattctttgttatttcacttactaatagtaactaaaatatgagacatggacaagatgagaaataaaattcacctagttacaaattcttccctataataagatttgataatggcagattgcaagaaataacttgaacgaatttaatgacgtagattaagcaggaagatctcgattggtgtatgccaattaagacatttaagtggccgtgaattcagataccaattgatttgaaccagttggtaatcacttagttcttcaatggcttgtcccttgggaataaaccgtcgcaaaactcggttacggttctcattactaccgcgttcgtgcggtgaataggcatgggcaaagtaaacctgagtacccgttagctgttcaattgcctgataattagcgaactctttaccatgatctacggtcagcatcttgagtttgtcttgaagttgactagctagttcaagtacggcttgagtcatggactgactgtcgcgaccatggagccgtttaacaattgtcaggcgactcttacgctccacaaaagtagccacagcttgacctttacgcttgccagaaagcacggtgtcagcttcaaagtggccaaattcctggcgagtttcgactttatgaggacgctcctcaatggagcggccgtgactgaacgtaccacgcttttctttagcacgatgacgacgaattccatgatcaggcaaatcgggtaactgtacatcaagccagccttgatcaatccagttatagaccgtcttgtaggcaatcccaactacatgggcaacttgttcaggggaccacttctggacttgaatcttttcctcaatcaagtgcttaaggcttttagtgagcgaagacttccgcccccgttgactaaccttttgttcaaagtcagtttgcgctagctcagcctggtactcactatttagccggtgaagttcgttaatgatggtggtcttactaaagcctaagtagttagcgatgtatcgcaaggaacgtccttcattatgaagcgtttcaatgacaacacggtgctggaatgataaaatagtggtgcccatcaaggtccttctttctaatggaatgttgaggtaacaccattaaagaccttgatgggtttttctgtccacttaaatgttcaacttaaattttacaatctgccatatgcaaaagctactaacacgaaaagggaaataattaaatatggcttaattaaaattgaattaaataaaaatgttgactttctaattttagggtgttaatcttttgataatcaatttaacaaaaagatgttgatcaagaaagattagtaatacttacttaagagagccaatgtttggtgtaaattggtggacagtattataaaaatctatcacttgtgagtcgtatatcgaaacttaagtagaatatactggtaggcgcccattattgtgtcagctaattgttgctttgcaactgttggtgaaggtagttatttcactacgaaaaaaggtggtaccacgtgaaaacgtccttttcaatctcagctttggggttggtaaggctttttttatttaaaatttaaaggtggtggtgtaaatgtcagatagcgacattattaatattaaagaaagtatactaagaaactctattaatcatagaaaggtgtttccttttttgattaatatttaattcattgtttaatttatgacgttatataacgtcttatttaataaaaattggaggacttacctatgaaaaagcttaaagcacaccgtctattttatgtattaactcttctaggaacacttttgcttcttttaaccggatgtggaaagtcaaataaatcatcacttcaacaaattaaagagcggggtactcttagagtgggaatgatctctgctaatccaccatacgaatcacagattcaaaaaaatggcaaaacgcaaatgcagggcgctgatgttctactagtaaagaaaattgccaaaaacttaggtgttaaatatgaattaaagacaatggatttagatggacttttgcctgctttacaagctaagaaagttgatatgttagttacatcaatggctccaacgccagaaagacaaaaagcggctaagtttactgacacgtattacaagagtaccaatgtcttggttgttccaaaagctaatctagctcaatacaaaaatgccaataatttcaagcatgctaccattgctgtagttaacaattcatctcaacaaccaatgattcataaggtattccctaaagctaccactaaggatctatcaaaggttaccgatttagctttagcagtaaataatggaaaagctgatgccttctgtattgacaaaccgactgcaattatccttctgaagaagaatccagaattaactatgacttcatggcgacacaacgatggatcaaaaggtggtgctattgctcttcctaaggggacttcggatgaccttgtaaatcgcttgaatgaagtaattcaccaaaacaaggcacaatatagcaagtgggttgatcaatatgcacagaaaggaaccaactaacaaagattagaaggagtgattttatgttttcaaattactcatttattacagaatattggccattatttatacatggtcttgtaacgacaattgaacttgcagttatctcaattgtcttgggtctactattaggtattaccttggctgtgatgaaaatgtcaaaggcaaacttactaagcttaatagcaaaaacgtacattggcttcattcgtaatactcctttattggttcaaatatatatcgtttatattggccttccacaattactgggattctccgtaaatgactttgtaacaggtatagtggcgctaaccttgtattcaggtgcttatattgcggaaattattcgatctggtatccaatctttaccggtagggcaaacagaggcagcagaaagccttggtattccatcatatcgtattttattggatatcatcttaccacaagcattcaaaaatattcttccagcactgggaaatcaacttatcggtaatgttaaagattcatcattggtatcagtattaggtatcaccgatgttatgtttgccgcccaaacagttcgtggttcaacagccttaggattggaacccatgattattgcttctgctctttacctggtaatttgtctgattctgaatcagattcttgctttgtttgaaaggaggatgcgtcacgatgcttgaattacgtcacgtcacaaaaaagtttggaaataacactgtcttacatgacattaatcttaaagtccataatggagaggttgtagtgatcattggtccttctggatcagggaaaagtacgttgattagacatatgaatctcttggaacagccaactagcggtaaagtacttttccaggataaaattatttcagggagtatttctaaaaaagcccaacaaagggtccacgaaaatattggaatggtctttcaacattttgacttatttcctcattttactgttagacaaaatatttcgtatgctccaagagtggtaaagcatttatcaaaatctcagactgatcgacaatcgacggaattactaaaggaaatggatttagaaaataaggctgatgcctatcctgatcaacttagtggtggacaacagcaaagaattgcaattattcgatctttagcaatgaaccctaaggtaatgctttttgatgaaccgacatctgctttagatcctgaaatggtagaagaagttctgaaatcgatgaaaaagctagctaagagtggcatgaccatggttgttgttacacacgaaatgggatttgcacaggaagttggcagtcgcgtagtttttgtagatagaggtcacattttggaacaaggcacaccagatgagatttttcatcatgcaaagcacgaacgaacaaagaactttatttctaaaattctatatacctagaatagagagtgtatctaattatgttagaaaaaaatattaagacaccattatatgagcaaattgagattgaattaaagcgcttaatcaatgatgataaatataaacaaggtgctttaattgcttctgaatcagaacttggcagagagtttggagctagtcgaatcactattagacgggctattagtgatttggttgatcagggttatctggttaaaaagcagggaaaaggaacttttgtccaagcaaatatggttgaacgtaatttattacatctaggaagctattcaaattttatgaaaaacagtagtaagcatccttctgtacaaatagttaagctacaagaaatagcaagtacagataaaatagcagaattactaaatattttccctggagaaccagttataaatttgaagcgactagttaagtttaataaggaagtaagtggcttagaaagtgcttactattcttcaaataaattcccaaaattaagagaaaaaatcaccccagatatttcaatggctaacctattatctactcaatatggatataaggaacagggtagtaatcagctattgagctatgtaccagctactagtgagttagctcaatatatgaataaggttccgggagaacctctattcaaattacgtcgtcaagtaatggataaggaagttatttatgtgacttttaactattacgacgcatctactaccaactttgccattacatctggaaatcaaagaaaggaatgattctatgagggtcttggccattggcgataatgtaatggacatttatctcgatagtaagagaatgtttcctggtggcaatgcggttaacttcagtgttatggctactcgaataccagaaattactagtgggtatcttggcaattttggcagtgataatttggctggattaatgaaaagtacattaaaaacatttaatgtcaacattgatcattgtagaaatttgaaaggtgaatccggatattcgctggttaaagttgttaatggcgatagaagatttctagctagcaatagaggcggcgttctgaatcaaggaattaagatttcagatgacaaggactatattaatgcaatggatttaattcatttaagtgttaatggtaatggaaaagaaataattaattacattagtaaacctaaaattgtctatgactattccgatttctctaatgagaatgaaataactttgactattgataatgtagatcttgcttgtttctcagtggggaatgtaagtaaagatagagtagttgaacgagcaaggcagcttcaaagaatgggaaattatcatactattctactatttactatgggaaaacaaggggcaatggtttttgcaagaaaccgttgctattaccagccggctcaactgactaatcatatcaaagacaccatgggtgctggagattcttttattacttactttagtacaggcttgctaagagaaaattgggatataagctctattcctaatattttgaaatcagctagtttatttagtgctaagcaattaaaaatagatggatcactaggagtaagttttaatatccctggtttgcaactaaaagaattatgtaaggagaggtaattatggaaaaagaaacaactcgtcaagaagtacaagaattagtaaaaaaaattgttgatactaaagatgttaagtctttagtgtttatgggatgtggagcatcttattcagaattatttggcgcatattattatgcattacaaaactcaaaggaacttggtagttatttgcttgaagcaaacgaatttaattatgatgttcctaattattttggagaaaatacagtagctgtcatagcgtccctaagtggtacaactaaagaaactttaaaagcagtacataatgctaaggaaaaaggcgcaacagttctagcattgacctttgctcctgattcaccactaactaaagagtccgactatgttttacagcataagttttttgaaagttatgccacaaagtcttctaaacagaaggtagctctaacctttgcggttgaattattgcatgcattaggtgaaagtaataattataatgaaatggtacaaggattatcagtagttgatgaggttgccaatgatgcagctgctagtgtggataatgatgcacaaaaatttgcagaaagatataaggacgaagacaaggtatttacattatcatcaggttctaatagaggagtagggtattcaactgctaactttatctttatggaaatgcaatggattacaggagttaatcttgatagtgcagaactatttcatgggccttttgaattagcagtggaagaagcaccattcctactatttatgtcagatggaagaacacgtcatctagactctcgagcactagaattcttgcaacgttttggcactaagtatacggttattgatgctaaagactattggctcgatagtaaaatggatgcttcagttgttgattactttgatccactggtgcttacctcagtaatgagaaagtttgcagagtatctgggaaaagctcgaaaacatccattatcaaagcgtcgctatatgtggaaactagaaaattattaaagtaaaagaagtaccacataatagttagaaaataatctaactattatgtggtactttgctaagttacaaaagaggagatgaattaatctacttagtcaaaaagagaaatgggaaaattgaataaatattttttctaagtggcagattgcaagaaataacttgaacgaatttaatgacgtaaattaagcaggaagatctcgattggtgtatgccaattaagacatttaagtggccgtgaattcagataccaattgatttgaaccagttggtaatcacttagttcttcaatggcttgtcccttgggaataaaccgtcacaaaactcggttacggttctcattactaccgcgttcgtgcggtgaataggcatgggcaacttgttcaggggaccacttctggacttgaatcttttcctcaatcaagtgcttaaggcttttagtgagcgaagacttccgcccccgttgactaaccttttgttcaaagtcagtttgcgctagctcagcctggtactcactatttagccggtgaagttcgttaatgatggtggtcttactaaagcctaagtagttagcgatgtatcgcaaggaacgtccttcactatgaagcgtttcaatgacaacacggttctggaatgataaaatagtggtgcccatcaaggtccttctttctaatggaatgttgaggtaacaccattaaagaccttgatggttttttctgtccacttaaatgttcaacttaaattttacaatctgctattatttgaaaagttaagcaaatcgattctgtaaaagcaatgataatggacttaaaatgcatttttgaaagcttttaaaataattgttgacaaatccactagctagcgataaattaaaatacaattaaataatgattataaaaacacgttgaaaagaagagtagctattagcagatggcaagagagtccccgtttggtgtgagaggatgatttacttatagtgaaaatcactttgagtgccaggatgaaagatagtaatttctggtgggagtagcccattatagctaccgtgtttaatacaaagagtattgaacatttgaggctagtagtgtgaactactggcgaataaaggtggtaacacgcagaagcgtccttagattaagcaattaatctgagggcgcttttttataatcattaaatttagaaaacaaggagttgcgttattatgaaatttacaatcgttggtgctggagcaatgggactccgctttggtgtattattacaagaagctggaaatgaagttgattttgttgaaggctggcaaccacattacgataagatgaaagaacagggtggtgtttacgttactcgggaacaccagaacaaacatttagttcctgtaaatgtatatacccccgaagaatacacagcgacagacgcagactttgtattctttgaattgaaacaaatgcaacttgatgatatgttgcaacgttgtaagcatttctttaaggatcaatatgtcttaacagcaatgaatgggatggggcatgttgaaaagttgttgaaatacttccctaaagaaaaattagttgcggggaccgcattagttgccactattttaactggtcctggtgaagttgaattcgttggtaagccagggatgggaactaccaactgggctaactatactgaaaagcctgatgcaaagactgaagagctgatggctgaattgaagaaagccaacttcaatccttcattaaaagataatttcatgggtactttgatggctaaagtagtctttaactcagttgttaataccttatgtacaatgtttgaaatcacaatgggtgaatatgctaactttgataaggcagatgaactttctcgccaattaattgatgaagcatacgatgtctgtgaacgggctggtgttcaattggttaatacccgagcagaagaattggaaagtgttaactacgtatcaaaagttggcaaccctcaccactacccatcaatgtaccaagacatgagtcataatcgtcctgtcgaagttgactacatcaatggttactttgctaaattaggtcgtaaatataactacgaagctaaaacacatgcttttgttactaaccttgttcacttggctgaagcaacaagagaaaagaactaagactaaaccgttaataatggtagccaagctactgatagcaacgctactaacaagccaaccattgttttgcctactaacggtaaggaaagtggagcagctactcaaggacaatacatcaacgttgttcctaaggatagcgttgcagcacaagcaggcattcaagcacctgcagctccagaaactaccagtgtaacatttggtactaaggaaggtaccatgatgactcgtgaagaatacaaggcacaacaagctaacttgccacaaactggtaacgaaaacagtaaagcggttgttgctttgggcgtcttggctggtatgtttggattaggcttagcaagtaagggtaaaaaagaattttaattagtatatatttgttctgacataatatatccgttattaaagcaatgggacttctgcttgatgttctttcacaggaatcccattgtttttttatttagaaaaaggattacgtttatgttgcaacgtaatccttttgaattattacttattctttttcttgtccttattttccttttcttgctcttcaatgcgtcgcaggaaagtgcgataatcttcatattcgcccgcactaagatgtttcacttgctcgtcaataaggtctctcatataaccacggataaacttgtgccctgataccattactaatgccttaatctcgttctgaacgtcgatgtcgacgccaatgttaccgtgttttttggttattgttttatacattgttattacctctccttattttttaaaattatccttaatctcaattgcgttaagaatattcataaaattgtttttatcagtaggatttaaatgtgctacttctttatcaacaattttgcttaacagctgtttttgagttaccttttggatactagataacgcaattaatttgtttcgtgtgacgttgctaacactaactgaagttgtgtaattttgattcttcttagtcatatttgttttcctcctttactatgttctaataaaaaaattttttgaaataatttttttattctatgaagcttagctaaagtaggagatactaaaaaagctattagcagagactaaacgaaaataagctatgaacgttatttgatatgttcatagcttattttttatgattttattttattgttactatttattttcttgagccttacggttactttccattacatgccaacaataattaattgccttagtatattcaacccctgtacgattgtagatattagtaggtaaatcatatccataataggtgcataggttatctatagtgtcagaagcatccccagcaactctaaagggatcggctaaatcatcgattcttttctttgataagtcaatgccttgtttttctaagaaaaaagtggatgaattgaaggtaattagtttactggccttattaaatattgactgtatctcgttcttgtaattgctaaatggttgctcattataggtttcctcaggcttgatgccatttaagtcagaataccaccaatctacaagcttggtattaaatgtatgattgaataatacattatcgttagtgtccatgatagtaagcctgactatttcatctagagctgcaggtccagtaagatctacccaatatactagttctctattcttcattgcaaatcacctcgactggcatcataactctgtggcgtattaataggctgctttctgttattgatttgccttttaatcctgtaaagagtagattttgaaaggtgaaattttaattgagttgcagcatatgtgtgtgattgcaggtattcgtaagcttgacgataaatgggcgtgataacgcgtttatggcgtcctcctgtattcagcattgattgatacttagccttcttaattgccttagaagcacgtttctggcgcaaataatgtagatagtcaaggtgggctaactgtgatgcaatgatccaatcactgctatcactatcactgcttaaatccatatcgctagattggatgataatacctgtattttccactatgtacatcaaacaacatagttctctaatgttgctatatagacaagttagggtagggactactagtacatctccttcttgtgcgactgttgttagaaatttaaatagctggtatcgctctttattgttttgcctaaagacatcagcaaaacagtgatcgtatggtatacccatacttaataagatttttgcttgatattcaaagccgtcttgtttgatgacgctatcttttagccagcctgaaacatagccatattttgtcatatcatttcactccttatctatttgataagagtaatctaactaaaaaaggctattcaatttcattttgagattgaatagccttttttagttataaataccaataatatggactgatgatgtagtatgttttcatttccttgtttgtgctaaggcagtcttaatatgagaaagtgtcattgaggtgtcaaataatgagtgaaagtaccatacttttaattgaaaaaaattggagaaaagcaagggtgttagtaggtggtatgaggttgtgacagaaatgggtcagatttgggttggatattgacccctatttatggcaccaaggtaatccttactgggagtaagaataaagtggtttattaattgtatttctaaaagaaggtgtcaagtagggaaattgccgtaaaaggttgatttagagggatctataaaggtattgtgtcagaagtgccaattttattctatttttttaagttctaactaagtatcttaataaaataacaattaatttattcattttgatttaaacgatagatattatttaaagatcctaaatgaaaattggcacagatgacacacaaagcacataatccctacttactattgactttacaaccacaaccataaactaacaccaggggtcagcttttacatcaactattttcaatttgtttctttattctttgcaatgttgaaactgaaatgttaaaagccctggccgtatccttataagtatggtttgaaaggtagtcatatgccgcttgatagtgaggtgtaatcaacctttttggacgaccttcatggtagtctctcttatggagtctagcataacgttttccttcttgagttctatccactatcatgtcacgttccatttctgcaacagctaaaagaatagtcttaaccagcttaccaattgtagagttttcaagtatgcctatgttgagtacattaaatttaatgcctttgctcattagtggatcaagtacatttaacgcctctctagtatttctagctaatctatcaagcttggttactgtaatagtatcaccatttcttactttattagttagttcgtcaaacttaggcctgtttgttgttgttccagtaaatttctcagaataaatattacttttgtctatacctatttccattaattgacttacttgatcgttaaggctttgccctttagtcgatactctggcatatccatattcagtcatttctattaatcccttttctgaataaactttatgaccacaggataactccgttgtttagggattggaagtcttgttcaaatactcaaaagttgatgaacaattaacgtcacgtacctactttataaaaaaacgaaaaaaatcaaaaaaaatatatacggtaaaatgtataaaaatccattctatattaataaaaaaacgtgttcaaacaccgttagatgaacacgtttttgaatttatttaaatttcagcaaaagtgcatacttattgcatatataagtaattatataacatattatattcgttgtcaatagtaaaagcaaaaattaatttgatttcaataaaattatgtgttttaataaaaaatgaagcgaaggaaacaaaccatcaaaaaaacgtttccttcacttctgtcaaaatgtaataagtaatcatgacgaaaacttatcttaatttgcaataagaatgtaacgcttcatttaaataccctttatataaaaaacgttctacattcatactattagtatactctaattttcgagaaatagcaaataattaaagataggtcccgtcattgaattacttattaatcaatggagggacatttttatgttatttaataatcatggatatgtaggtcaatcgcgaagtgtaaggtctcaagaagctattgaagagcatgaagtacctttaaatcaaatcacccgtgacttgattaatgaagttattgaagaacttgttgacgaggagacaattgataaggaacaagaaaattggctaaaagccattcccgtatatgtttggaaaaaccaaagcccaaccagctggcatcatacaggtaaatattatcacgaaacctatcattatgatcttccactctatgctgaagaatttatcgatgatcctgaaattgttgatgaaagcgtcaaagagcataaacgagaactatctgaacgtaggcaagcattgcttaacgaatctactgaacctgaatatgaagtatattattattctaaggatatttggggaggaacacgccggcatcctaagattgttgatatcgaacatggatacggtgttgcaaagaaagagagcagtcgtttatatcccgtttcggtaagtgatgaagattggccaaataactcctattattcgataggtggaaattatattactgttaagcaatatagtggatatttagaattagtcgctaagcatcctgaattcaaaggaactaaaaggaaactaaataaagttctcaaagcattaggagtaacccctttaactttaaaacaagaattgtcgaaagttggaggtaataactaatgcctaggcgaaagcatcatcataaaaaagataaagtatttttctttaaaagtacccctcaatttttgaaaatggcagaacttgctcacttgaacaaggaatttaatcacaaaactaatagtaaagagtcaattaagctactgccaccccagatttctgatacagttattaccaatgggggatcccataagagtcagcaggatcgcttaaattttactaataatgggatttatgcatacagtaagtgcttagcccaagacgttgtacaaatagatgttcattcattgctcccaacatgggcctttaacttacggctattggatcataaacataaacaacttttcttgagaaaaaaagaaatcgaagcaacacctaattatatagataataaacgcctggtaaatgaacgaaaaagagataaagacaacctcaaccgcttttgctcagagaatggaaaaacaaagaatgaacagtatgttaatcgactgagatgtacgtatagcggaatgaacatgatatacgatatgcttcaattctggggtttagaaaacgtgattaattgtgttaatgatggatttattatcagaataaatacacgaaactttgataagaagtatcaacaatttcaacagcgttatcaaagaaaggttagtcaattaactttttcaatgaaaaagtggaactatgctttaataaaaaacgatcaagaatacttgttatttaattctttaacagattataaatgtcgaaatcattgttttgatgttggagctaattattatgaaattactggtgaaagtctaagagaagcaaagaaaaataaccatgttaattctttaattttagctaaagcagaaaaacaagaaaaggaggcagtgtatatagtggaaaagcaagtatttgaccaagatccttttaataaagcaacaaaagaaaacatggaacgacttgatgaagtaaaaaagataatgaatgaagctggaattcaggacatcaatcatggtatcttgcaacctcattattataggtttgaacttgataaaaatgatagtcagcagagtaaagaatacataaataaaattacaaagagtatgttgagcaaccaaatttttatgctcgaaaatccccctgctagtactgttaatttattcggtcaagtaataaaggcaactgaaattaatgatatggagcagtatctcagagatcataaagatgtaactgttaatgattttgtgcctccaattattagaccagcaatagtttcaattgatgactggattaagcagttattgaatgacaaagagattaaacataatctctacctatataatagtgtagcaattgtgttgcaagtatgggcaaatgaaaatagccgtgatcctaataccattatcaagaagttaaatgatgcgttagttaaagatagatttagcaatctaagtattgcagataaagtgtataacgatcctgcaactatccttgttgataatcaattaatggcattaaacgagcatcatgtgtacactgcagattctaaagcggtaaatagcattattgacaaatatattgatgcaagcggaaaaaggtttattcgaaactctcgtaataacgtgtacgaactccttaataataataagtataaaaatggcaaattagatatcggatttaaatctgagaatcagacaatctggattgacaataaaggcgtccacacagaaaatccactgcttaagaaggttggcaattacgtaaatgttgattatatcaattatgaagcagataaggatttatttaactcagaagaatatagtcaagttgaagcattcctaactcatataagtgatggctactataggcaaattacatgtatgcttgctctaattgttttacaagaccctaatattgttccaacacttcgcagggctttcatattgtatggagtgcctgggtccgggaaaactgttttagctaaactattatgcaagatttttgatgaaccaaataagccgtcaagaatactatgctctgaaccaaatattaataaagtgtttacggatcctaatcttattgatgctaatgataccaaaaaagggaaattagtattgtggtttgatgattttcagtctgatggtaggtcgaatgaaattaaaaggaatgttggaacggtaataaatgcagtgactagcaatgaggcgaaaacgggagctgcaaaattccaacaatatcacgatattaaactgccttcattgattgtactttcaacaaatgatgtcccacaaataaaacatattgggactgttgataggatttttgtcataaaatcatcaaaaaggttaacagacgaccctaatattagttttagttccaatatagatgcgtggataaataataagaaagttcaagaagcgttcttctgcataatattaaataccgctgttgatatcttaaatatgagcaaagatgaagcaaagtctatttttgacaaaagtaattccgctcaatcagcactatcaaaccttaattcgtctattgaagctttttttgaggaacaaaatattacaagtctttatgatcttgttggaatgcaagcaaagaaactttttgacgtttatttagaaggagaaaaaaattttgcttatgcaaccacttatcgtgctttctgcgatcaaattgagggattaggtttgaatttaagacgaaagcattttaatcataaaaactatcaaaaagttatctgctcgaaaaatgataatttaacgcaagaaaagttgaatttaatgttaaaagaaaatgaactatctcccgatcaagttgaatattgggataatgagattcatcgtcaacgaggaaaggttagttcgtggcattgtggttatgatgaattaaaagagaagtataaaaatgatcagaaattatttatgccatttgaattttgaattaacgattgaaggggatttacgtgaataataaaaagaactttaattggcaacaggctattaatatgaacaaggatatttttttggaatattttgctcaagcaagtggattaagtaaggctaaacgtcaaccaattaacctaatggaagaagaacataggattggtgtttacttttcatccgcagcatatcttgaatggttgaataagattaatgatatgaaacatgaaattatgattttaaagactaaaaagtaggaggaacttattatggaagcaaaagacttaatcggcaacactctaatcaaaaagattacaaattctaagggcaacacttggaaaccagtattgcgtcagcgatgggttggtaaatttaaaggattaaaagaatatagtcgctcatcgctgaaagataattatctaattttagaagtaggcggttactttgatggccttatttttaacccggacccatttattgtagtggatggaaaacgaatttatctgagttacgaaaattctattccaggcttatgtcgaatcgtactagtggatattcgagctttggaactctcaaaaaagtatgattttaatgacaaatatcaaggattcgactctgaacgtgataaatatcatattgctaaattcaagtcctttgacgaaatgaaaaagattgcgaagaaacaatactcaattaataatgagttgccgacgtatgatattaagatggtctgggaacaggataaaactagtgagacatatggtacacggcattattccgtcacgacaaatgtaggactttctgaagaactagatgaagaacttttgaaagcataatattcattcagaattgcaatgtgcagagttataatccaatccataaggaggccattattcatgtttggcaaagaaattttaaacggaaagcagctgtgtgaaaaactaggcgtaagtaccacaatcttgtatgaattattagataatggactaccatttcatcaattaacaacggcaagtcgaaaatactataacctatcagaagtcgaaaattggctgctaaatgcaggatatcgtcagaaaacgatttggacaaagtaactatagataataatgatgggggtcatgctttgtgctgaccccattttttgaaggtgaaaaaatgattaagaaaatgacaactggtaagcacaaaggagagtaccaagtgcgcatccagccgattaataagattactggtaaaagggaaagctggccagtagattacgcttctaatcgtaaaactgctaagtcattagaaagacagatgtgggcagattatgaggaagggttgcaattagctgacggcagtgcgatctttgcagatgaatttcaaaaatatattgatgaacgaaagaatacgatatcacctgttacttaccgtgactggcaaaattcagcaacggaatttaagaaatattttaaaaagactaagataaaaaatattactgaacgattggttgagcagttcgctcacgactttattaaacaacataaggctactgtaggacgtgctactgtaattgatcatcgcctgacccatatgcgaagtttttttaaggaattggaaggtaaggtagtaaagaaaaatccagtacccgagcaatatttggacaagttttttcgcaaaaacgaattcagtgttggtaagcaacgatacttattcacaagcactgaacttaaggctattaaggctcaaatacaaacggagttaaacaatactacaattgctaattggggcacccgtttagcgatttggattgatttggaaaccgggatgcgtccaggtgaaattcaagccttaaaatttaaaaatattaccacggaagatggatattctacctttaaaattaatgatagttggtcagactatgcgcgtaaattcaatgggacacttaaagcacgcccaaagggatactcacgatattgtttacctatctctcaagaattagtggatttccttgtcacataccagcaaagacaaaaagaatttctaaagtatcatgatttaacgaatcctgaggggttgctctttctcaacctacacgattataggaagtgtgtaaataatattcccatcactcagaagagcatgaacgaaatgttaaagaaaatttgtaataaattaggtattcatagtgatggatcacaattatctatgtattcttttcgacatacattatgtacaaagttagcgaataaaccaggaatttcatatccatgggcatctgagcgaatgggtaatagtctttcaatttttatgcgtgtgtacgttaaaacagatcgtgacatcgatcgaaagatgatggataattggatgaaataaaaagcaattagtaattgaacgtgaaaaaaatatctattttttcggtgcaacaaatgaattatcggtgcaaaaacagtcaattttgcaccgataatttttaaattgcactgataaattggagagattgggttaaaataataaagaataattttgataagaaaggagatgaaggaattgaaagtttttaactaccagactttaaatgatttaagattaactactaagatggttgaaaaactcaatcaaatctatgagttaaaagggaaaacagcccatgtatccttaaaatcaaaagatattatggataaattattagcggtagcaaaaattgaaagtacagacgcatcaaaccgaattgaaggtattgccacaagtgatgcacgactaaaaaaacttgtaagccaaaaaactactcctgaaaatagaagcgaggaagaaatttcaggttatcgcgatgttttagcaaccattcatgagaattttcaatacattaaaattacacctaacaacattctagcgctccataaggaactgtttaattttactgaaagtacgtggggcggtgaatttaaaaatattgataattctattgtgactacatttgcggatggtcatcaggagacgagattcactccaccaccggcttacttaactcctgaactagtccaagacttatgcacggcttacaataatgcaattaccaataattcttttcctcctttaatattagcagctgcctttatgcttgattttgtttctattcacccatttagagatggaaatggacggatgtcacggctattaatgttgttagaattacatcaattgggttttgaagtcggaaaatatattagtttagagcgcttgattgaaaaaacaaaagctgaatattatcgaactttattagaaagttcaggaactgcttggagtaataatgataatcattatggcccctatgttgattactttttgagcatcgttcttcaagcatatcgtgaactaaatacacgtattgatttcactaatgatactgaaaaagatccagaatcattagtgcttactaagttacgtaatagtttaaaacctttatcaaggcgtgaactgatgaacttaattccacagtatggtgagagtactattaagcacgtattagcagaattacgaaagaagaacataataaaactggttggtagagggagagcaagtcgatatacagttaatgactaatcggtgcaatttaaaagttatcggtgcaaaattggctggctttgcaccgataaaatgattattgcactgaaaaatgcacacaactagacacataaagtcaaaaataattggcttaatcgttgatatctcaatggttggagcaatttaacctccaagcttctagtcagcactagaaacatactaaaagcctataacaatacgtttttaccgtatttgttataggctttttatgttagtttaaggctatgatttctcacttttttcacatgttttgaactaaatgatatcctataatttttatgatcacgaaaatggttgatatgatagtatttgtagtcatttaaacgtgtgaaaaaatgtgaaatgccagaagaaggtattgtaagcaattatacttcttcttcccaacaatgcgtccagaaaaggaaactaaagatagcaagaagggcaagaagaaaaataagaagtagcctaaaaacttgctatgacggcttttaagcgacttcgtggatttaggctaaatcagttattagcttctaaaaagttagtaactgtggtgtgtgtacaccaaaaatacaccaaaaatacaccaaatttaaataaattaagttggtaaaaagctggcataaaaaatgaagggctacgattctctatttgggaatcgtagtcttttgtttaaagctataattgaagccttaaagtaatcagtaatatttgatgagaggtcaaataacccttgttttagcttactttattggttgaacgataaaatctgttactccattaaaaaagacctgttagggcacgacaaggcgaattacaagggctgcgctaatagatgcgaaaatgaaagcataagataatggcattttggcaatcttaagcctaagccaactcagcaaaagtaacacgtttgtttgccacggtgaaagcattcaatgtaaaaactgggtgtttttttattgagcagttaacgtttataggatatgaacaatgtcaatagtattattaaattcctattattttgtataattagtatagtaattatacaaaggaaaggaacggatttgtaatatatggctcggcttgatcagaaatctatagaacaattaggaattaataaagtagaggatgcactctggaacgttagagactgggctgatttcttttttagtgaaaatgataagactccgctgttagatggcaatatattaatttatagtaggcagattgcaagaaataaattgaacgatttattgacgtagattaagtaaaaagatctcaataggtgaatgccagttgagccacttaagtggccgagaatttaaataccagttaatttgtgttagttcgctgttactcaactcttcaattggctttcccttgggtataaagcgtcgtaggacccgattacggttttcgttactaccacgttgatgtggtgagtaggcgtgggcaaaatataccggtgtaccggttaatttctcgattgtgtgaaagtccgcaaattcttttccatgatcaacggtcagcgttttgagcttgccattaagttgatgagctagctcgacaattgcctgcttcattgattgactatcacgaccattaaggcgtttaacgatggtcagacgactctttcgttctacgaaggtggcgactgcttggcctttgcgcttgccagagagaaccgtatcagcctcaaaatgaccaaactcctggcgggtatcaacactagcgggccgttcttctatggagcgcccgtggctaaaggtaccacgcttttctttggctcgatgtctacggataccatgatctggtaagtccttgagctggaggtcaagtaatccttggtcaatccaattgtagattgacttataggcaattccaaccacatgcgcgacctgttcagctgaccatttctggaccttaattttctcttcaatcagttgtttgagattagtagttagagaagatttgcgtcctcgttgagtaaccttcttttcgaagtcagcttgggctaatcgagcttgataagcaacatctaaacgatggagctcattgaagatagtggtcttactaaagcctaagtagttagcgatatactgcaaggaacgtttctcgttatgaagtgtttcgatgacaacgcggtctgaaaatgataagatagtggtgcccataaaggtccttctttcaatggaatgttgtggtaacaccattaaagacctttatgggtttttctgtccacttaaatgttcaacttaaattttacaatctgccactactaaatgtgtactatataaacacgtatttctgatgtaaaaatgttactccagtaagttaaaaacagctattaagttatctaacctttaaataaaagggttgataaccatggactaagacgacagcagggtatcacgcaggaacagcttgctgagatgagtgacttatcacttaattttgtttcaaaaatcgaaagaaaacagaaacagaacattatcattaaaacattgatggctcttgcatcagccttaaatgttaaaccttcagatttgcttaagggtagcaagggcccagccagtaatcgtcgtaagcatgtggatctgcttagtaggcagctatataagttacctgaaggtgaataaaaagcttcctatcgggacttactgttcaacccagcattaaacttaatgcactcttttaacttcattaccccgctccttttaatattctcgttcaaatatttaatcgcaccattaagatactcccgtttaattaccgttttaagatattccaagcgaaatatttaaaaatattttcgcgtaaatatcatttaatcattgcgtttaaatttcatttaccaactgcgcttttcccgtttcaacttcaaaattaagttcaaaactttcccaattccgatctttgacacacgacatatttacagatatgcgcaaaagtttgtcaaaaacaaataaataactttaattaagcttgatatttcgccattatcgcgcagctaaacgcttatcatttttagcgcttcgtgattgcacatatttttagatatgtcgtatctcaattgccagattagaaaaaaacgcttgttaattttgttggcgggtcgctcggttacaaaggtaatcacacccacccataaaacgagtgctttgttctacggctataagccggtatgtacagctaacgcctcaaggcactgacttgtcttgttgttgacttgaccgctttacgaaattaggcagcctcgcgcccgctgaatctcgagccttagctgcctaatcgttgacatcattcaattttttcttgtttaatcaatgtggataaaaaggccgatcaatatgaaaagataatcaacggtctaaaaagtcgtcgtgcaattaaagaaaagcatcttcgggctgatagtaagcaactcgagcaattgagcaaacagattcgttattactcagcccgtcgggccaacttgctgacggaacggtatcgccaaattgctcggcagttgtttgctgagtatgagctaattgccattgaaaaactcgatgccaaagaaatgcgcaagaagaatcagaaagggtcaggggccactaatcggggtaagaaccgtaagctggcgaaaatcaagccttacgaaattgcgttgcttttagagcaaatggccgatcgtgaaggcaaaaccctgctgaaagttgatagttataagaccagtcaagttgaatttggcacacaataccaaaaagtggtgagcgtcaatgggtgtctaagcacactggaaaattgattgatcgtgatttgaacgctagtcgtaatattttaacttgggcccttgatcctaagaagcatattaagtatctcgaacgtcaagcagcaatcaaagctgctaaaaaagctggaatcactaaagacaagttgccaaaagcgattccagccagagtattagttacaacgaattaattaacgggcgggacagaacctcgccgtccgtccccaaaggttttgagagttactgttggcgtatcaccctgagcgtgcaaaacgggtgcgaaacagtaattaagatcaacttgatctcaacggcgcaagccgttgcattgcctaaacgttttctgagattgagcggctcttagcagccttttgatccagaagcgcggtcatttatgactgagtagttcacgccagcgaagttagcacggtgatcatgctatggattaaagggggaatggcagaatccagtgccgaattagcccaaatgttagcagtcattcgtgatcatcccctcaaagaaattgtcggcccggcccatgaataaatcccagaaaaccaaaaattaccgccaacaaggacggtgatcggcataagagagaaagagaattgattagaaggtaaatacttaataccttgtgactatatgttagcgtttacacatggatttgtcaataacttccccgattttatttaaaacggtttcattccttggcttcttgacttgcgcgcctggttatgacctagcgtaggcgaaagggcttgatcagggtccgcagtggggtgtggtccagcccccagactactacgtagcccagcaccaggccggcccagttggtaatcacatcgtcaatatcgaccacccgcaacgtgtgaaccaaccagtccgaagcaaactgggcgctttcaatcaccagccccggcacgagcccggccaaagcaacctgccaccacgaccagtgcggccgccaaaggtagcagtacacccccagtggcccggtcagcaaaatattggccaaaaattccgggtcgacgtggacgaacgggtggaggttatacggcaccatgtaaaaatacgacagggccttgtaagaatctggcaggatcagcccgaccggggcaaagaccagccaggccaccaccattaagtagcccaggctggtaaagactgtcacccgctgggccggcgtccggtttggtaccgccagtagccggtaataccccgctagcaaaatcagccaagccaccccaaacgtcaaccaccgtgtctgcaacatcaaattgccctcttctataaatagttctagcttaccgaacgcaaccggacctgaccaccgttgatccccaagcttaaccagaacttaatttcccagcatttcccgggcggtcgccaccaggggaccaaattcggcggcaaaggagctttcctttaagtagatcaaattcaagggatgctcgagcggaaagccggccagcggcaattcaaacaaatcgccccgggccaattcgttggccaccagggcccggtacataaagctgatcccgaccccctgcttaagtaattcaatgatcgccgtcgggctgcttaaggctaaggtctggcgaaaatcactcagctgggcgttgtgcgccgccagccaggtcgtcaaaatctcgcgggtccccgagccggcttcgcggacgatcaaaagctggtcaaacaaggctggcaatgtcgctggcgcctcggcctgggcggtcacgccgataaagggcgcactgcccaacggggcggcggcaaagtcctgccgcgaataattaccctcgatcaaggccgcatctaattgaccggcgagcagctgctgggacaggacagcggtattttcaatcgtcacttccagctggtagccggccgcgatcaccttggccagcagctgcggcagtaaaaaggcccccagcgagcgggtcgcccccaagcgcaacggcggggtctgggccaagcggagccgctttaagaccgcctgattgtcctgcccgagccgtttagcgtaggccactagttccgtggccgccggcgttagcttgacccggcgcccgtggtggaccaacagcgggacatctagatcggcctccaggctggccagctgctgggagacggccggctgggtgataaagagctgctgagcggcggcggtcaacgagccggtctgcgccaccaccattaaggtcgtcaaccggtggtccagtaaattttccatcgccctgcccctttcataaggaaaactaacttacaagaaagaaatcataatttttatttatcagtctagcatggtacattaagaatgtaaaaaaatccggatgtcaattcggaaaggagaaagtgaaatgctcaagaagatatttagctggccctttgcttgcgccgcgctcttaaccttaatttgttcgctggccggcagctacctggccaccctcccctacctcaaggtgattggtgccttagtgatcgccctcttgttagggatggtgatgcaagttggtcgcccggtcctggattacagccggccgggaattggcctgattgccaacaagttcctgcgtctcggaatcatcctgctgggctttaagctcaatttgattgccctggcccaagccgggatcaagacgattgccctggccgtcgtggtcgtgaccttcacgattttagtcacctaccagctcgcccgccgcttcggggtcgaccgccacttagcgatcctgaccgccagcgggaccgggatctgcggggccgccgctgtgatggggatttcatcgcaattaaccagcgatgacgatccagccaccaagttgcgccaccaggaaaatgaggtggttgccgtagcgatcgtggcgatcctcgggacactctttaccctgatcgaaatcgggctcaagccactcttgcacatgaccgccctgcaatttggggtgatgaccgggggcagcctgcacgaaatcgcccacgccgtcgccgctgggagcgccgggggcccggtcagccttgatacggcgatcatcaccaagctttcgcgggtcctgctcttggccccagtcgcgatcttagtcgggatctggtaccaaaaggcgacccggcaagccaacccgaccggtgaaaagcagccggtgccgattccgtggttcatgctcggctttatcctggccagcgtggccggcacctttatcccgggcctggccgcgttggtaccaagtctggtcaaattagcctacctgctcctagggatggcaatggccgccttggggatgaacgtgaacttctccgtgctcttcacccgcggcaagaacgccctcgtggccgccggaatttcttcggtgttgctcttgatcctggtcgcaactttgtccaagaccttcttttaatccgtaattaaacgctaaaaccgccgtcttccaactcccggaaggcggcggttttgtttaaatcatgcgtcattatctgacttcaactccgtaaattgagcatctaatttagcaataatttgagcgcgtaacgtttcgatccgtttggctactgattcccacataaatttaccattagatcctgatttttgtatgtacctcgaagaagatgatgaaacaaggtacagagctgagtcttataatttaggtcaattcaggctaagtatgtcctggaataaattgatacttaaatataggaacagaactattgatgagttacttgttgtattcatggatagtgctactttcatgacagtcactcctagcctaggttccataagtcccatgtctaacagtgatatgctcacattccaatattacctagctgattcgctagatttcgccgttgaaaaactaatactaaatatgaagagatcatcaattactcctaattataatcaacaatcaaaactactaaaaagaattattatttttaagaattataatcagctaaagcaaattaaatcagttttgcagaagcaggatgaatacatcaagggaaaatgcgctcctacaaaagaacaattagaattatgtagaggcgcactttcaatggatttcggaaaggatacccctgaaatgaatcaagggcatatcgaagttatgtgtgaagaagcaaacgtcagtcaattcataaataattatttacaatcagagatcattaacaataaacgttctcgttgattatcgtacaataccccttagggttgacggcactttaaataataaaagcgctgatcctaaggggtattgtacgactgacgaacagaggtaatttttactaagcgacgatcggttgttatcttttagagttattcacgtttaatgtagtttgaaaatgttttctttataacccggtttgtaaaattaagttagaaaaacaaaaaagccatttgtgatagacttttgagtatccctaatcaaaagaaaggcaatcataaatgacctacaaacatcttaccacacgtgaatcaactctcatagctgaattttatcgtcaagacactcgagcttatcaagttgctaaatcactaaggcgtagtgctgaaacaatttatcgagtttatcgttacttggatacgggcaagacaattgcgcagtatttaaagcagtaccaacggaataagcgccgttgtggtcgtaaaccaatgacgttacctgatgatgaagtaagttacattaccaagcaagttagtcaaggttggacaccagataccattattggtcggtcagagaagaaaatcagttgtagtatgcggacactttatcgcatgtttgcccgtggtcaatatgactttgatgttaagcagttaccaatgaaaggtaatcgtcatccaaatggctacgttgaacgacgtgggaaagctggccatcttggtcgcagtatttaccaacgttaccgcgattttccgcattaccaacatgaatttggtcatttagaagctgatacagttcaagggaaagctcaccatggcgctgtgatgaccctagtagaacgaatctcaaaagttgagattgtcttgaatgtccatcacaaaacggtcgaaagtgtgaactattatttggatcagtggctatcaaaacagcctcgtcatctttttaagtccattacctttgacaacggtaaggaatttgcgggctggcgtgagattgccaataagcatgatatccatacatactttgcggaagtcggtgcgcctaatcagcaagggttaaacgaaaacaccaacggtattcttcgtcgtgatggtctgagtaaaaagaaagacttccgtaattgctagggcttcttttagtaatgaccaattaccaacaaggttacattctgctttatccataaatttgcgggaatacccccacttctataagtaggggatgaatcgctctcttaaagcacgttagtgctttttcttttgttctatgatatatttagtatatatctataaaatgtggtgataacaatagaattagatataaatcagcattcagtatacttacttaattaccatttggtaatggtggttaagtatcgtcgaaaagtaattaacgatgaaatatctgaatatcttaaacatcgttttgtagttgtgggacaagcatacggcattaatttgcaagaatggaatcatgatcaggatcacgtacatgttttgtttagagcaacgcctcatacggaaatggctaaatttttaaatgcttacaaatcgtctagctccagaatggtcaaaaaacaatttccagaaatcaagcaatatctttggaaatcagccttttggacacaaagctattgcttaattagcactggtggagcgcctttagaagttgtaaaacgatatattgaaagtcaagggagaaaataatggttctaaaagctgttaaaatgcgcatctatccaaattcagcacaacgaaatcagctctggcaaaccttcggttgtgttcgttttgtatggaatcaaatgcttaatatgcaaattgaacggcgcaagaataatccggaagctaaatttgtgaatgcctttgggatgaataatctgttgaaacaacttaaggttgagtatccttggttgaaacaagcagaatcaactgctttgcaaagtgctaatcgcaatttagccgatgcttttcaacgcttttttaaaggtcaaaataagttccctcgatttaaatccagaaaatattctcagagctacaattcaaagtacgttaatggcaatattaaagttttagattgccatcatataaagttaccaaaactcggtatcgtctattttagagctggtcgattgccaatgggtaaaattaagaatgtcactgttcgtctgaacgttgctggtcaatattacattactgttttagtggaaagcgaaaaccaaactcttcctaaaacaagtaaatatattggtggcgatttaggacttaagtcgttacttaatctttcagatggatgcaaggaaccgatcaatcattttgaagacaaataccataaaaagttgtatcgttgggagaaattacgtagtcgtcggttcttaaaggctcagcaggaaatcgcctgggatcatcataataaagtgttagttccacggcaattagatgattttaagaattatcagaaagctcgtattatggtggcgaagtatcggcaaaagattgccaaccaacggttggatcagctacaaaaattcactactaaattggtcaaaaagtacgacatcattgtgttggaaaaacttaatactaagggaatgatgaagaatcaccatttagctagagcaatcgctaacgctagctggtcaaaattagtagatatgttgcaatataagtgtaactggtacggtaaaaagcttattcaggtcaatccgtcgtatactagccaaatttgtgctaattgtgggaagaataatcatcggttaggattgaataaatcggaatggttagcggtacgtgagtgggattgtccaaactgtggtaaacatttagatcgtgatattaacgctgcacaagtcatcttgcaaaaaggattagctatccgatagataaagttaggctcgggacgagccttggctaatagtcgtaacctctgcttgaaggttcgttcagaatcggtagggtaagtatgcgatgtttccagaatctcccacttcaagcattaaaccgtaggtttagctaagtgggagtagttcaagaaaattgcaataatgggcttgataagattacattaactggtgaagttcaagatatttttaaggattaatagttatttccctcatcgactacaagttagcgatgggggattttttaatttagggaaaaggctaattcaatctggagtggtgatttgtgataatcaattatagtaggtcgtttgaaaaacagagaggtgaaggttagtggaacaactctatgaccagtttcaacgaaaaattgattatttacgattatcaataacagaccggtgtaatttacggtgtgtttactgtatgccagaagaaggattgaagttcttccctaaagataaaattatgtcccaagatgaaattattcagttagtgcaaaatttcgccaaaatggggattacaaaagtccgcctaactggtggcgaaccattattacggcgggacttacccgagattatccagcgtattcggcaaatttctgaaattaacgacatttcaattacgacgaacgggacggccttgaagtatcaagcaaagaaattgaaggaagcgggtcttgatcgccttaatatttctcttgatacttttaatccagcagtatataaaaagatgacccgtggcggaaatattaagcatgtcctgcaagggatcgcggcagctgaacgagagggctttaagattattaaggtcaacaccgtagtcgtgcggggcgaaaatgaccaggaagtcatggattttattaattatacgaaagaccacccgatcaatgtgcgctttattgaatacatgccaatcggacaagagattagcgattggaaaaaagaatatgttccgctaaccagcatttttgataagtgtcgcgaggcggggttaacatatgaaccgttatcattgcccggtaatggtcctgccgataactatcagattaagggttaccgaggtagcttcggtttgattcacccaatttcagagcggttttgtgaatcttgtgaccgtttgcgaattacctccgatggttacgtcaaagcctgcttatattggaatgaagaactggatatccgaccggtcatcaatgactttgcggcatttaagaaagtagtgcagaaggcgctaaataataagccgttaaatcatgaaatggcaatgaaaaatgttcatcagattattaatccagcgccaacgtggcggcatatgagtcagataggtgggtaaaaatggcagctgatcaaaatactggcgctcctttttcgccgacggaaaaccgggtaatggatgctctgcagtcggtaattgacccagaattaggggtagatattgttaacttagggttgatttatgatgttcaagttgatgaccaacaattatgcgtgattaccatgacgctaacgacaatggggtgtccggttagtaacgtcttgagtcaacaaataattgaacaagctttggcaactgacggggtagcaaaatgtaagattaacttggtctgggaaccagtgtggaatccaagcatgatgactcgctatgctaagattgccctgggaattcatgaataagtaaaaatatggcgtgcagctttcgtgattgaaaactggacgccatattattatttagattgttggtcaaagatgaagtggccgcttttaccaccgtctttttcaacgagatgaacatcactaatgactattccccggtccattgctttgcacatatcatagatggtgaggagggcgatttgcacgacaaggagggcttcaatctcaacgccggtgacgtgcttggtcttaacggttgcctctgcagtaatactatcctgaccgttattgtggaagtggatatcgacaccggtgagggggatgaggtggcacatggggatcatttcagaagtccgtttagcggccatgattcctgccacttgggcgacagcgaggacatcgcccttttttatttggccatcttcaattcgttgcagggtggttgcttgcatatggatttgtccttgagccgtagcggtacggaaggtaacctttttagcggtaacatcgaccatgcgggctcggtcctggtcattgaaatgtgttagtttgtctgtcatgataaaaccccttttaattggtagattaactttaggatagcataatcgataagcaaaattattcagtgattttaccaaaataaaaatgacatcgcctcaacaatgtcattataaaaataattattcgtttcttagtgaagttacttcaacatcgttatcgtagtttggactccaccaaccttgcttattaatgtatccggatggtaagcaccagattacaaattcaataacatcaactacaaaggaaattgcttgtaagacattactatcaccactagctaaaataacggcaattagccagaagacaagcactccccaaccactgatgccagcgtcaatcttcaatattaacggaatacttttattaccttaagaaaagcttaacaatttagatataaataaaattataaaacccaaaatgtcaatttaagttagaaagaaaatagttgctcatcagtgacgtaagacatgaatacttcatatggagttcgatagcctagcgatttacagggcaggttatttcgcttactcatcagttaggttaccaattcatcaggaagattgcggaaatctagctgtttcgttaagccatcccggcgtaaaagaccgttgttgttttcgttcagccctcgttgattgggagcaccaacctcggcaaagtaagtgtgaaggtcaaattgattggcaatctcgcgccagccggcgaattcttttccgttgtcaaaggtaatcgatttgaagaagtgccgcgggaatttccgaagccactgacttaagtgttggttaatcgcatcagccgtcttttcgtgcacattgagtacaatttcgaccttcgattggcgttcggtcagggtcattgccgccccttggtgctttttgccttggacggtatcagcttcaaggtgcccaaattcagtggcatagtgcggaaagtccttggcacgctcgtgaatacttcgcccaattggccagccttcccgcggcgctcgacatagccattcgggtgccgcttacctcgcatcggcaaggaacggacatcgaagccgaactggccacgtttaaacatccggtaaagagttcgcaggttacaactaattgggcgctcagcgcgcccaataatggtatcaggcgtccacccctgggcaattttgtcgttgatataagtgagttcagccagtgacaactgagtacgttttcggccacaacgttgcttattgcgcatatagtgatcttgataatcagcaattgaggcaccggtttccaggtaacgataaacgcgataaacggtttcggcacaacggttgatcatttgggccactcggtacgctttaagcttttgcacgaaagaatgggcgatgattgtcagctcgtttgtggtaagatgggtgtaagtcatttgtggtttcctttcttttgtttaggggtattcaaaagtctaccacaaatggcttttctatttttctaacttaattttacaaacggcgatcttgtttagaggaattagtgagaaaacctactgactatagataaaaatttatgtccccgttaaaaaatgatgtaaaaattcggggcaagtcataaataatgatataaagccactagtaacacatattaaatgatactagtggctttattatttacattggttgtccagttgagatttcaaagccggctgttacaggaattacttctcccgtgattgcactagcagctgggctagccacaaaataaattgcagcggcgacttcttcgggttcaacaatccgatttaatggactgttttttgcgaatttttgtttatcttggtgaaaaagcggggtattagtcggaccgggtgcaacaacatttacgcgaatattatttttaccgtaatcaattgccattgcccgagtcatgttaataatcgctcccttggcggcattataagcaaccattgctcgatcaccagccattcctgagacagaggaaatattaacgatactaccatgatcttgttcaatcattgttggcaagaaggctttgctaacgaggaaagttcccttaacatcaacatcaaagattttatcccaatcttcttcactggtttcatgaacctcgccgtgaataacgattcctgcattattgataatcgcatcaacggttttaaatttattgagggttatttgcttagcatgttcaacctcacttgatttactaatatcggcttgaataaaagcaatttgtgccggggaatacgtttcgcctaattgtcgttcaacttgcatccccttttcggtatcacgaccgataagtaccgtattccatccatttttaagaaaaatatcagcagtggcaagaccaatcccagaggttccaccactaataacaactgtctgcatatataaaactcctctctaagcttttctctaattatggcatttttggtcagatttagctatttattagaaaagtccttataataaaataaggataaggagggaatataatgaatacagcaaccttagaagcacttcaaaattggcttcatggacgtggctatacattagaacaagtagacgcacaactaattcttaaatatcatggacaagaacgagcagtcattacgccacctgatcgctatcaagtgaaagaccttgacctgaattttaatgactgggttgaattcaataagtgcattcgcaatattcgccattctttagctagtaacgaatagaaagccttttctttggcaagaatacctcctcgtgatagagttattcatgaagggaatatagtccaaggagggatagtcatgataagagttggaataattggtgcttctggaatggcaggcagtgcaatctataaattagcatcgacaaaaaagatttgaatgtaactggaattgttcgaaatgagagtaaggccagaaagatccttggtgatgatgccaatttgatcagtggtgatatttttgccttaagtgataatttgttgtcgcggtttgatgtaattgttgatgcatatggtactagtccagagaatgcggatcggcaagtaagactggctgagaaattagtagttttagcccgaaaacataaaatccgtttaattttcatcctcggtgccggaagccttaaaactggtaaggataagcatctatttgttgatgatattgaaaagatgcctggtgctgagacatggattaatacaccccgccagcagttaaaagaattacagtatcttgaaactatttctgatattgactggctaggaatttcaccatcggcagtatttgaagctggggttgcgactaattatattcttggtcaggatgaattattatttaatgaacaaaatgaatcaaaggtaactgcaggaacaatggcaaagttagtggtcaatgaaattttagcaccacgccaccatcgtgaacgaattaccgttgttgatgcagaatagttattggaactataaaaggcatgagaacgcaaatcaattctcatgccttttaatattagtcaactaattttccaataattggaagttttgaaaccggtgaacactttttggctgcttgttgataggtgacatctgataaatcatggccgaaaacattaccgtggatttctgcgcctttccattctggaacttcagaaacatcataaacatttccacgcaccccgatatatactggacgaccttcttgcccgttatattgcgctaattcattgtgagtaaatgaccgcataataatccctcccataaagaagctgggaattgactcggcctcttcctgtatgagtgtaatgagatatgaaaatagatgacaagtttattcgttatcctatcaccactataacacgaaaatggtaatgacatcggaaattcaatttattcagttgctaagtttgcagcagggcttttgactgagactttcacgagcattcctgcaatgatagttaggatcgtaacgaggaatgggaaaaatgcccaaggaatgaaacttaatggattgatttgtaaggtactagcgatgaataccccagaaacactccatgggacaattgcgttgactgcggctcctgcatcattgagaatccgggttaaatcaacccgctttaagcctaatttgtcaaatgatgggagaaatgattgtccgggaagaataattgcaaggtagtgttccccaacaaggaggttaaccccaatacaagtaagagctgtggagaatgttaaccgaccaggtgtctttacaatcccagttaagtgattgatgatagcgctaataatattgaacttgatcaataagccacctaaagcaagcgcgaagataattaaggctagagaagtaagcatactagagataccgcctttagaaagcaatgtatcgattgttttatcaccggtatgggagacgtaaccagtcatgatggtattagtaatcgtagtgaggctggttttaggtgcatgaatccagccaagtacgaccgcgaagagtgagcccagaccaagggaagggatagcaggaacttggaaaatggctaatacgattaagagcagaactgggagaagagcccatccagagatccagaacccactttgtagcccggccatcatttggtgaacggcgcctaaactaacatttttggagtttaaccctaagaaagtgtaaagaataagacaaattgcccaggcaggaatatcggtggtgagcagggatttaatatgcttgtagatactaatttcaccaacactggcggcaaggtttgttgttcctgaaagcggggaaatattcgaaccacaaaaggcccctgaaacaattacccccgcagttaaaccggggttaattttaagagttgcgccaatgccaataaaggcgattcccattgttgatacagtagtaaatgaacttccacaagcaaccccaacaagggtacaaacaataaaaactgttggtaagaagaactttacagaaataatctcaaacccaaagtacataattgttggaatagttcctgagaaaatccaggtggcaattaagacgccgatagaaagaaagataatgagagggtcaacaccggctcgcaaaccatgacgcattccccccatcacggtatcccatttaaatccacgaattcgcccgtaaacagcaagcaaaacaaatgaaataaataatggggcttgtggttcttggtgcttaaaaataatagggtagcctaagatgcataaaataacgccaagaataagtaaactttcactaaaaccaatcactggctcaggactattttttgatttgttaatagttttcattgtgtaattctccttattttttaataaaaaaataccaactagatcagcggcatttacttaatctagttggtattacggtagtataaaaactcgcggaaaactacacgcccttactagatcaatgtacctagcaaaggactcattaaaacaaccctgcttaggtacgaacaccgctgtccgtacctaaatgagtacagacaattatgcacggtaagcatagttgttataatacttggttgaagttaatgagtgttgaatcatgttagtcgttcctttcaagttaagttataattattaaaacattctaatttgattttgtcaaactctaattttaaaattcgccagaaatatccttatcagaaaatgaatgagggtcggggacaaaagaaatatcagtgtcaattattccaaatttttctcgcattacattttcgatgtgctctgataattggaaacttttgaggatcgtcattttagcgttaaccatcacggaagcatcaagcgtgaccacatttccgttatagtgagcttttagttcgacaacttttacaacgtgtggaatattggtgattgtttggcggtattcctgttcagcccgcggatcaaagtagtcggttaagttaagactgctttcaaagaaaatttttagtccagaatacagaatgaagaaaccaacgacaatactagtagcaccatcaagccaacgaaggttaaagaggagagcaccgccaattgaaatcaaagttccaatactggtgaaagcatcactcaggctatcttgggcagaagcaagcaacgcggcgttttttaatttaagccctgtttggcgattcatataccaaacaactaacataataactgacgcgattccggccccaatcaatgcgactggttggggaaccacccgacttgcaggatcgaggagacttttaatgccatcgatgataacgcttaaggcaatcgcaaccataacgaccgctgtgacaagggaaaaaattgtctcataacgccaacgaacgaattgtactcgctggtcagatcccatgtgcgcttgataatttcccgaaggcagctgtgcgccgatgatatcatcatcatccacatcctgggcaatgtgtaagcccatcatcaataaaaaggtcgagataattcccgaaaggttgttaaaggcatcggctcgtaacgtctgcgatttacttatttcagctaaccagtactcgataattgaaataacaacataagcaatcaagttatagattaaatggtgttgggaagctcgaatctttgctagttcatttgcttgcgttttttcccagttattcatttcttcggttgtatgtcttttaaatttagtcattaatttaagaacttccttgattaataaaatcagtttaattgtaacgcaaaaaataaaagccgagaaaacgattttctcagcttttactcaaaataataatgaaaataattgctaggcccggttattaattacgtgggcgcatgttgcaataatcagtcccataaaacttactacagcgatcatattactcataattgacatcatattgaacaactcctttacataattaaaatattttttacagcacaactaattacagttgcctttttggaaaacaaattataatgattgttttcccctctccaccaagtattgtaacaggtcttagcaatagtgacgataataattagctaagcttttaatgagcttttctacgaaagaaaggagtgattataagcaaaatattataagtaactatcatatgaattaatgatttttaattattaagtcaaatcgaattatttctttataaaattaatctatttagctaatctgtttaattcttttaaggctagaggaaattttgtgaagccgtcactagtcaaaaagtggccgcctttttctttaactatgagttttgctctaattttattagcgaccgcaatgctattttgataaggagcgattgggtcatctttagctgttataacggtagctttagcaagtttagggagtatatgctcataatgaggctgatctttcataaactcatctaattcaggataagctggtaattctttgtcaaatgctcccacaagtaaaagtcgtgcatctttaacatgatgatgttcaatataacgaagggcggtaatacatcctaaactatgggcaacaaggatgaggttatcttggggatgaatttggtcgtcaaccgcttgatcccattcagcttgttggggattaaagggatttggtagccatatccgatcaagggtaattactggttttgcttcttcttcgagccatggaaaccagtcatcatcacgggtagacgtaccatgaattaagtatgcgttcttcattattaagactcctatttcataaagtgtttcaatattaccatgccgatgattaacaataaaatggcaatcgaattagtaagaatttcataaggctgaccgtgggcggcaattagtccccggattaaagccataattcctaagcttaataggaaatcgaccgcaattcggccatgatgttttagcgcggcaattatcattgtcataaatgaaaagaaaaaagacaataacacgatccaaaatcttaaaaataacatgatccgtattcccatcttgcataaggggaatcagccaaaaagtttccgtaaataagataatagttaataaaatccctagaattgctagtgcgccgattgtacatagacataaaatatggctaaaattagccgctaatttatatatttttttcattctcttatactcctcaagaaaacgctttaaccttaggatagcaatgatcaagaaatttagctaatatttaacaaaatagttgttaaaaatatgcgatacttaaagatgaatactaaaaggaggggcgaaaaatgcgaaaaccctttattgatgctaattggaagatgcataagaatgtccaggaatcggttgaatttgtggacgcaattaaaggaaaactgccagatccgcaagaagttgaagtcggaattgcggcccaagcttttgcattaccgagtatggttcatgctgctgatgattcagggttaaagataatcgcgcaaaacgcggcagctgaatattcgggagctttcactggtgagattagcttacgaggtttagctgatgccggtgtttcatacgtaatgttagggcatattgaacggcgccatttattccatgaggataatgagttggttaatcgaaaagtgttggcggcccttcaaatgggtgttaccccgataatctgtacggatgaaacgatggttcaaaaagaagtcaacggagagattcattacgttttccaacaattaatgagtgtattgaggggcgtttctcttgaccaaataaaaaatgtagttgtttcctatgaaccaagttgggcagttggatatggtcagcatgctaatccagttcttgctgaagaaggatgccgtcaaattcggcgaacgattgctgataactatacttatgagattgctgataagatcaggattctttatgggggcagtgtcaatccagataatatcggaatgattatgaacaagccggatgtggatggagtattaatcggtcgggcaagtttagatgttgataatttcttgcgaatggtcaattatcttaaaaatgatcaagaaaaataaaaaaagtatttctctttgccgtcattttatgttatagttattaacagttgttatggcggtattggtgaagtttggttaacacaccggtttgtgggtccggcacgcgtgggttcgaatcccacataccgccctgacctagcgcgatagcaaaggatttttcctttgccatcgcgtttttttgtattctctgttttatgaattttaattgataacatccaagaaagtaacttaaaatagtaagatggagaaagaaaaaggggctttaattatgaaaaacgtacaaattggtggaacaagttggaaagtatcgaacgttgcattaggtattatgcggatggggacgttagcagtgactaaagcgattgatgccttagaagccgcccacgatgctggaataaactttattgattcagctgatatttatggcaacgacccacagttaggacgtggatcttcggaaatccattttggtgaagcattaaagaaaagcagtcttacccgtgatgacttttacattcaatcaaaaggaggactttttgcgaacgcggataataaaataacgcggtatgattcgtcaaagaagcatttaatcgctgctgttgatggaattttgcaacggatggggattgattatcttgattcatttttgattcatcgtccagaccctttaatggagcccgcagagatagcagaggcctttgaccaacttcaagcatctgggaaagtccgccattttggagtatcaaattttaacccgcaacaaatcgcgctccttcaagcggcgacaaatcaacgacttttgattgaccaggtacagtttggcttaaagcatacggggatgattgattttggcctgcatacaaatatgactgatgatgctgcaatcaatcatgacgggggattattagaatatacgcgtcgtaaacagatgacgattcaaacatggtcgcctttccagtacggtacatttgcagggacgtttattaataatgatcaattccctgagttaaacgcaatgttagaaactcttgcgcaaaaatataaggtaagtaaaaatgcaattgccgttgcatggattttacgtcaccctgcgcatatgcaagtgttgcttggtaccatgacgccagctcatattattgacagtgctaaggggagcgatattacattgacgagccaagaatggtatgatctatatcttgcggccgggaatgatttgccataatgaaaaaagattatctccagttctatcagcatattacagctcctttttatcgatacccgtggacaattcctttattacgggcggttaataaatttgttgtgtggactatgtacgttgcttacatcgttatattagtgtgggtagggaaaaataatgtcttgaaagcaggaccttttctgcttattcccggtattggctttatcctgctttcttttattcgccaacgaattgacgcaccacgaccatatgaagaattttcgattaaccccttaattctacgtcaaaaaactggtgattcattgcctagtcgtcatgttttttcggcgactgttattgcgatgtgtgggttaaggttaaatttgattttaggagtgatcttactcgttttagctgttgtttctgctattacgagagtgattggcggagttcattttcctcgtgatgtggttatcgggtttatttgtggctttatttgtggttcgtttttatttcttgtctaaattttagaaaggtgtatttcatggacaattcagtgctgcaagatgcaattttgaatggacttattagtactcaatatcaaggtaatacgctgctaggtccgcaattattaaccaacaaccaatcatcgacaatttggcaaacgttacggcacgaattactgtcatgtaaagactttacgtggtcagttgcctttattacgttagatatgttagtcccctttaaggcagtgatggctgacttagcacagcaaggagtacacgggaccatcattaccagtaattacttgaattttaatcaccccgcgatgtttgaagaattgcaaaaaattcctaatttaacggtcagaattgctgatcttaatggatttcatactaaggggtatttatttgatcatgggaaatatcagaccgtaattattgggagtgctaattttacacggtctgctttattagttaataaggagtggaatttaaaattaagttcccgccaagaaggaagcttttttcaacaactaacgacggaattggatgctgttaaacatgagagtactgttctaacgtcagagtggattgcggagtatcacaagaattggcaaccaccaaagactagggtgacgcaaccagaaaaattaaaaccaattgaacctaatcaaatgcaacaggccgctttaggacaattaagcactctgataaaaactggcgctaagaaaggattggtcgtttcagcaacgggaactggaaaaacatatctgggagcatttgcggttaaaaaatatcagccgcgccgtttcttatatatcgttcatcgagaacaaattgcaaaaaaatcgttagctagttttcgacgagttatcggcggcaaaaaaactgattacgggttattgacaggtaatcgccatgattggaatgctaaatatttatttgcaactgtccaaacactaagccaacaagcagtactgaataagctcaaagctaccgaatttgactacattttgatcgatgaggcccatcgtgcagcagcacctagttatcaacgaattttaaaccactttatgccgcaattttggttggggatgactgcaacccctgaacgaatggacaatcaagacgtatttaaactgtttgattatcatttagcctatgaaattcggctgaaagatgcattggctgctaaaatgttagcaccattccattacgtgggggttaccgattatgaagttgatggagaaattattactgagacttctaagttaaaccaattgattgctgtaaaacgggttaattatgttcttaaccaattagactattatggatattgtggcgatcagccccgtggattagtattttgtagtcggcaggcagaggcaaaagaattggcagtccaatttgccgcggctaaccatcctgcaattgcattgacaaatcaaagtagtagtcaagagcgagcaaaggcagttgagcaattagaggcaggaaagattgagtatatcattaccgtcgatctttttaatgaaggggtcgacatcccatcagtaaatcagattgtaatgatgcgtaatacccaatcaccaattgtgtttattcaacaactggggcgcggcttgcgtaaatatcctggtaaagattttgtgacagttattgattttattggaaattaccaacataattacatgattcctcttgctcttaaccaggataatagtcgaagtaaggatcaagcgctccgtgaagttaaggtgccaacgaattttgacgtttcaaccattaactttacgaaggttgccgaagaacaaattttagtctcccttgataaagttaaattggactcgatgcgtgaattgcggcaggcataccatgatttaactaaccaactagggagaacaccattgctggatgacttttatcgttatggttctgttgatccccgagtatttgcgcaaaattcccagctcaaccattatggtgacttcttagaaaagatggggatagaacttaaattaacaaattatgagcgtcaagtactagcctttttaactaaagagttgcttaacggtaaacggccacatgaattgattctccttcaacgcttacttcgcggtacgtgtttaattgatgcttttaaagcagaattaaagcatcaaaatattcgcgttacaccagctgttttacaatcagttgacgatattttaagtttgcaattctttaatgtaaaagctggtaaacaggtaaaaaaggatcagtatggcggacagccgattattgatcatccagatttgttaacgtatcagttaaattcaaaaattcgagcaggactagaaagtcacaatgatttcaagaggttgtttatagatgtactaacaacgggacttgaaatcgctaagcaatatgacctcaagcaagcatttaccctttatcagcaatatgaccgcaaagatgtttgtcgtttattaaattggcccctcgatgtaagtgcgccgttatatgggtatcgagtggcagaagatatgtgtccaattttcattacctaccataaggatgtggaagaaaaaagaaatgctatttataataatcaactacaagatggacgttcattgcgctggtacacacggacacctcggcatctttcatctgatgaggtccagcggttgcttgcaggagtaaaagagggtaagccgcaagtaaaattacacttatttgtaaaacagagtgatgcagttggcaaagaattttattatttaggtcctgcttatattcaaccggactccgtaagagaagaattggttgggccaaagaaaaaagcggcagtggggatggatttagttttagaacatccattgacctcaactatgatgaacctattggcaatgtaaccatcaatatatcgcttttattttttgctaaatcttctataattaaaggcgtagaaagaagatgcatattatggcaaaaggaaaggtaaaaactagtgataagcgttcagttcgggatgttaaattagatgaattggctggcttactaaatgaatttgatgtcaatacgataggagcactagtaaagtctctaaagaagagttaaaagaagaacaagcaaagcaagaaagatgaattacgtgataccattgaacgataacaagaacatatcgatgaacaaaaagacacgattgatcaacttaataatcatatttctaaactaattgatcgtcttgataataagctataaaaaaatgaggctgagaaaaaacttttgttttttcaacagcctcgtttttcatacgaatattgttacgatatcgtggaactagccttgagccttgtcgaggagattatttctcacttctatttcttatcattcttttttatttactggttgtttaaataaatcattaaatgcttcactaattgttgggtgggtatagatttggtcccgaagtatttgataggggagttttgcccgcattgcaagaacaatcatgttgataatttcttgcgcttcctggacataaagggtagccccaataattaagttcgtttgtggatcgactaataccttaagcagcccacgggtatccttcaatacttttgcttttggaattgcggcagcaggcatcttaaagagtaggtaatctttcccttgtttttgcgcctctttttccgttaaaccgacttgtgcaagggaaggttcaataaaaacattggttgggacaattaaacgatcactaactcgccgttctttattaccgaataattcatctttaataattcggaagtcgtcaagcgagatgtaagtaaattggggaccacctttaacatccccgattacccacacattaggaacgctagtatggaggaggtcatcgacaacaatcgcgccgtttttagcgaccttaatatctgtgttttgtaaatcaaggtccgccgttgcaggcttccggccggttgccactaaaattttatcagcgaaaatagttgtttcacgattatcagctctagcaaaagtaattgcagcttgctcatcttgttcgctaattgccttaatatcaaccccaacttcaaagcgaaccccgttatccttaaagttttgaattaccatttctgccacatcatcatcttcacgtggtagtaaagtctgatggtgatcaagaaccgtgacgtgtgaaccaaaggaagtgaacatatttgcaaattcaagaccaatataaccgccaccgataatcacgagttcacgtggtaacttaggctgctccattgcttgggtagaattcatgagaaatggactactcttcaatccaggaatatcagggatggttggtgttgcaccagtattgataaaaatacgttcacccttgtaggaaagagtttgcccatctggcgtttgcacatcaatcgtgtggttaccagtaaaatgagcagttccatctaagacagtgatattttcttcgcttgctagcatttgataatttttttgtcggagttgggatgtcattacattttttccatcgaccgcgtcttcaaatgaggttccatgagcagcttcaataattagccgtttggaagggagacaagcaatattaatgcaggttcctccatacatttgcttcgatttttcaataacaagaacttgttctccatgttgagcgagaaacttcgcaagcgtttttccgcccttcccaaaaccaatgataatatttttgactgttttcatggaagaaacctccaattttaattattttatgtaccttcaaattatactaagaataaacgctttgtcacttaaaacgctcaaataaggcaattgtgcagtttgcgttatattgaacaaagtgttaggataatatcgtaaatatattagtcccaactgcagtcagaacttgtatattaaagaaaaacgtattagatgaacattgtatattattgatcatagatggtgcttcatcaaaataaaacgttttactaatttataaaaagttttgattgaggagagattataatgaaagctgcacacttagtagaacactcccaaaaagcaaatgaaaagaagcaagttattcaagagaccaagtttatcgacattttaagcaaggttgcaacagtcgtagctattttgatgtatgtatcttacatttcacagattaagaataatttggccggaaattacggtgctcctttacaaccattagtggcagcgcttaactgtacgttatggtgcatttatgcttacttcaagcagcaacgtgattggccagtcttctgggcaaatttccctggtattatctttggcttaatcacttttatcacatgtttacactaggaaaaataggattgcgagaaaacaaaattttctccagtcctattttttatatgctaactctcaactctatgatataattaaccgaacgtatgtttaggaggagtagagatgccaaaagatgggatgtcggtagttcactttagttcttttgcgccggtgacagagatgattttacagtcgttgccagccgtgaaggacaaagaggaccagaaagcgccggccattaaaaactttgatcaattacgtcaacgattaaatagtcatgcgcgattccttattttggaccttgagttttttcaggatcagcagaagcatcgaaatggcgttgctcagattgcggggaagatgtttgaaacacaaaacagctttaattactacctctatgcccagaatatgtctgctgagcgacaattggcctttttgcgacaatatgacctccgcctttcagaagtaaacggatatgaggttaggcagatttttaaccggatttttcatttcattgcggtagagcggcctgactatattgtaagctgggataatggaactgactttgaatcattgaattatgaagcaaatcgattaaagattaggaaagaggatcgtccctggcgtacgattcagtcgttagatctggaaaagctagtcgctaaagaagtatggaaaagtaaaagtgggatcagcctggaaaagatgtgtcgtttattgcaccttccccgggttaaatatcatcaagcccaaaatgatgtgatggcgattgaacagatcttgaaattttatgcttgtgatttagagcgtgaattaaattgtcgctgatcgttaccaaaatttaaaatttagttcatgatttatcccgattgactttttattattagtaataattgaaagaaggtgaacgagataaatttcatttttcgactgcttaagcggatatttataataggacttttagtaggtggaggatggctttatttcaatgatgcacaagttcaagcaacggcgaaccaaactgcatggaacgttcgtgatcgcattgctaagttaattggcagagacgatacaagctcaaacgataattctaatctgcacttaaacgatacaaacaatggctcttccaaaagtgaccaagaaccaacgacagaacaacaaacaagtacacaaacttcaattccatctactggacgatgggcgactaatcaagcaacggtctatgtaaatacaaataatgctcaacttgacgcagctactaatactgcaattcaaagctggaatcagactggggcgtttacgttcaaaccagtaaataatcaaagtaaagcagatatcgttgttacaacaatgaaccgttctgattcaaatgctgctgggttaacgaagacgtcctcgaattcgttgacaaggagatttatgcatgcaacggtgtacttaaatacatattatttaactgacccaagttatggctatagtcaggaacgaattgttaatacagccgagcacgaactggggcatgcgattggacttgatcataccaatgctgtttcggtaatgcagcctgctggatcattctatacgatccaaccagatgatgtgcaagcagttcaaaaactatatactaataataaataaaatggcgagactgaaagaagtaaatttctctcagcctcgctattctatttagtctgtcattttccgtgcttttagtgcccataagatagagacagtatcaattatttcctgtaacatggcgccgaaaaaggccggaatgattccggtgctagcaataagcattaggatagtacagattgcaattccgattaggaccgcctgttttgcaatccgcagagtttcctgagaaatgctaacggcttttgcgactcgcgaaaggtcatcttttaggataacaacggcagctgattcactagcagcggttgatccgtgagctcccatcgcaattccaacatcggctgtcacaagagaaggtgcgtcgtttacgccgtcgccaaccatgaaaacaggatgttcatttgttggaatggctttaagtgcattgattttatcttgtggaagaaggtcggctttaacctgcgtgatcccgacttgttgggcaactttatctgcaatgacagcttggtctcccgttaacattaatagattggcaacaccaagccgttttaaccggttcattgtttgctttgcttcaggacgaatatggtcggtaaaagtaattgcaccatagtattgcccatctacgctcacatagatagctgttgctgctaacatctggtcaagattttcaggagatacgaattttaattttcctactttaacttcccgcccatcaacagttgctaaaattcctttaccagttaattctttaagttgatcaacggttgataagaaaacattatatgcagtggcataagaaagcagtgagcgtgctaggatatgtgatgattgttgttcagcacttgcagcgtaatggaggagctgcgttgagtctatttttcctgtagggaggattttatcaacggtcaattgaccacttgtaatagttcctgttttatcaaatgcaccagttttagcaactgctagtttttccagtacactccctgttttgacaacaattccatttcgtgaagctcggctcattccagaaaccattgccacgggagctgcgaggattaacggacatggtgaagcaacaacgagaacttccgcaaatcgttcgggacgaccggaaaatacccatgcaagtgaagagataataatagcaataatcgtaaatggaacagcgtatcggtcggctaatcgaacaaagtgggcaggagtcgattcagcctccttaaccaatttaacgagttgctgatattggctatctttggctagtttggtgacctgtaaagtaatggcattatcaccattaactgatcctgacatcacttcgtcaccagctgtttttgaaactggccgtgattcaccagttaatgacgattcgtcgaacaatccctcaccatttttaataattccatcgactggtactaattctcccggtttaacgataagctggttgccaactttgacatcgttaactgggatgtcgctagttttgccattggtgattaaatgtgccgtttgcggtgagttattaagtaatgcttttaattcggtgcttgcttttttggcagcataatcttctaaggcatctcctccggttaacattacaagaataaccatcgctgcccagtattcgctaacagctagcgttgcaacgacagccataatagcaagcagatcaacgccatatttaccgctacggatggtttttatcatgccaataaacattgaaaaagcaacaattgcgccgacaacagtaaccagaatttgagcaaaaagttgtaaatgaaatccaaattggagcacaactgcgattgctgcaattactaggatgatgattaatttttgcttattagatagttttttcataatacccccgcttagtcctcgtgctttctacaatttaattatagggtttttatgcaatgatataataaaaaattagaaatattaaggaaactggtgaaaaataatgcaaaatggacaatcttatcaacgaatttttgtagtgataattgattcattagggattggagcaacggctgatgccaatcattttgagagtttaggggctgacacactaggacaccttggggaacattttcgagtacggctacaactaccgacttttcagaaaatgggtcttggcaacttacacccgattatggggatgtcttcgcttgaaaagcttcacgctgcttatggtcaaatgagttcaatttcaacgggcctgagtgatcgcgagagccagtgggagatgatgggcttagcaacgaccgctgaacctgacgtttttattgatggtgtgccgttggaaatagcgactaattttgcgcgaaaagcaaagcgccctcttttaagcaattccttaatgaatattcgtactgcgttgaaagattatggccttgaacaattgacaacaggtggtctgctagtagcgacggctagttcttcaagtgtttggttaattgcgcatgaacagactatttcggttggcgaattaaaagaagattgtcagattttgcgaaaaatgttggataattccccatatactatcgaaaatgtgaatggccttctttttagtgggaaccaggcggctaatttttatccccaagaactttatagatttcctttagctccagcaagtccaacggttattgattgtctcttggaagagggttatgctgtgaagttaatcggggaaagtacccagttctttggtttggaccataatgaaataaccgggaataatcaagagagctttgttcagttgcaagaactgatcgagaaaaagtttacaggtatttgtatagcagaagtgggagagatagagcaatttggtaaagcacgtaatcctgaaggctttggaacggaattaatgcggattgaccacgaacttacaaaagtcatcgataaaatgcaagatgatgatttactgattgtgacggggaacttcgggaatgatcctacttatcctggtgaaaaacatactcgtgaatatgtacccttacttataacagccccgcaaattaaacaaaatatttctctcggtggcagaagttttagcgatattggggcaacaattcttgataattatgatttaggagataagttgccagttggtaatagttttttaagaaaattattttctgcatatagataaaagaggatggaaaaattctgattttccatcctcttttatctatattaacgatgaaatttatagtaaatagcaattcccataatcaaaagaaggacaagggcagcaagacgcgggtttgttttaaataactcgtgcattgcatgaatttgtccaataccaaggggaagagtaaacatagaaaagacaccctttcaaaatttacttaaacgcttagtagttttttataaggaattctttcatatctgttggttgatgtccagtgatatgcgcaaagtcgtcagtgacttggttcatcaagcccattgcagctgcttggtacatagaagcaagttcgtttccgtcaccctcagcagcgtaaatttcagcaaatttttttacggtaacgggatcgtaaccaatttcttcacccgtaacattagtcataatataactaagttctggcattgtataatttttgctcatggtaaggagataattttgtcccttatctcgcaagtatggcttgactgctacattggcgatggcttcagcgctatcttggcggaaataaaactaacatcgactaaattatgaacatctgccttaaacattgcagttagtgaattctcgaattcgtcaattcgatccttaactaagtaggtaatacttggaatatagataacaatatcaattccgttaaaggccgctgtcatcttagcgacgtcatagtagtcaattgccgcaatttcgtatccggcatctttgaattgggaagcttttgcgggattgtgaacgccaacgcggatattatctggagatataagcttgcttaattgcttaacaacgtgttgaccaaggtgcccggttgccccagtaaccatatatttcattattaattccttctttctttttcagcatcttttagtgcttgcttaacgcgaatagtgtcgatgacatcctgtaaactgattcttgcaagtttagcttttgctgctgtttctgcttgctggtaaaagccatcaagcgtctcttgaatattcccgccaacgatgcattgtggatttgttcgttcatcaatcgtaaatagatgagcatctccttcgatcgcaagaaaaacatcataaagtgagatgttttcaggagattttgcaagtgctggatctgctgcaccatgaacggtattgattaatccggctttgttgagcgcactcatcaaacgtcggacgacaactggtgaagtttcaatgctgctagcaatattattacttgttaatggaataattccttgataaatattaatgaaagcaagaatgtggatgctatcactaaaacgggttgaaattttcatattatcattcctttaatgctaattgtaatttataaagttacatgatgtcaagagattgaatttatcattgccttgacaattatttgttttagatatagtattagtttattgattgaaacttttttagttacaagctaggagaaaataaatgagatttaagaaaatcgttgctctttcattattaagcattgctggcttactagcagggactattacgccggcagtagcaagtgctgccagcaataaaccaattattgtgggttcaaaaaatgtttcagaaagtaagactatcagtgaaatttacgcgcttgcacttgagcatgagggttataaggttactcggaaacccaacatttcaaataatgtgatttttagtgcaacacaaaaaggcgaagttgatgtttatcctgattatacgggcacaattgtagaggcgtaccttaaaaagaaggggaccggcaagagtgctagtcaaatggctaaattagcacacgatggtattcaaaaagacggcttaacgacatttaaatacgccccaggtgataatcgccaaggtgttgcaatgccaactaaggacgcaaagaagtaccacattaccaatttaagtgaactgcaaaagaatgcaaagaagattaactttgcttcacagggtgagttcgaaaaacgtgctgatgcccttccggaaatgaataaggtttatggtaaatttgattttaagtcaattaaggattatgacgtaaatttactctataagattatggaacaagggaaagcacaagcagctccggtttcaacaactgatggtcaattagcaactgacaagtttacgttactaaaggacaataagaatatttggccaccatataatttagttccagtagtaaataaaaaagctgccaaaagtcatcccaaaatggagcaagccttaaataaagttgatgcaaagttaacaactaagcaattaacagatctaaacaagaaagttaatgtcgatgggcaaaattataagactgttgctaaaaattggtataatcaaaatatgaaataagtgccaaaggggcagatagctagtttttcttgctagatatttgctccttcgttataggcaatagatggggagtggtagcttgctagggcaaataattcagtattttcaaacaaatagcggccaatattggcaatatgttggtcagcatataattctgactgttgtaacgctagtgatttcaatgatcattgcattgccattaggatatattggttcgcgaataaaaccagttgctcaattttgtgtgatgtttgcgcaattgttacgaatcattcctagtttggcattgctgtttctattaattccatttattggaacgggggttgtccctgcgttaattgctttaattgttttagcgcttccgccgttgctaatcaatacaattctcggttttaatgaagtgagtccactatataaggaagttgggatagccctagggatggatcagcgccgattacgtcggcaaatagaaattcccctggcgttgccctatattttaaacggaataaaactagcattggttgagatcattgctagtgcaaccttagctacttatattggtgctggtggattggggaccctaatatttactggcttaggcttatacgatatgagttatgtagtgattggcgcggtaagcgttgctattttatccttgctggcaatgattagctttgattttttaattagaaaggtacaaaagcatgacagaaccaattattcaatttaagcatgttgagaagcgttttaacgatcaaatagtgattcctgatctcaattttacagtcaacaagggcgaatttataacgattcttggctcatctggttcggggaaaacaactaccttgaaaatgattaatgggttgatagcgccaagtgctggtgaaatcttagttgatggacaaaagcttcgagaactcgatctagtaaaattgcgccggcacatgggatatgttgtccaacagatcgggttatttcctcatatgacgattggacaaaatattgcagttgtgcccaaaatgctgcattgggataaggaagagattaataatcgtgttaaagaattactaagtcttgttcaactaaatcccgctgaatatatgaaccgctatcctcaacaattatctggtgggcaacaacaacgcgtaggagtggcaagagctttagcgactaatccaccgtatgtattatttgatgaaccctttggcgcgctggatgccttaacaagaatggaattgcaacgagaagtaaaaaagattcatgaatcgttggcagaaaagacttttatgtttgtaacccatgatattaatgaagccttatttttaggtcaacgagtgatgatcatgcatgaaggacgcatcgttcaatttgctacgccagaagaaattgttcgccatccagcaacggaatttgttgagcagcttttagggacgattcgccaaaatcaagatttgtggaggcaacaatatgattgagtattggaatgagaattggccgataatgcttgatgatgtccagcaacatgcaacgatggttctttcttcattagcaattgccttagtgattgcggttgtaataatcttattattcttacggcgtgaaaaatggcttaatagtttgatctatttcttttcactcttatattcaattccaagttttgccttttttgccttactcttaccgatttctggattaggaatgaagactgcaattattgttttaacgatctactctgaatatgttttattacgttcctttattacgggaatccgtggcgttgatccacaattaatcgaagttggtgtggggatggggatgacatctcgacaggtttttcgccaaattcaattgccgctagcattaccggcaatttttagtggaatccaagtggccctagcttcgacaatggcaatggcaactattgcggcaacgattaatgccggtggtctgggtcaattattgtttgaaggactgcaggggcaacaggtcgtgccgattttgtggggaacagtcttaacaatggctttgacattaatttgtgcaggaatcgttcaattgatctcgtggatattgttgcatcggtggaaaggagtattaaataactgagcaggaaattagtagtattcactgagaattcgtataatcaaaataggtaacgaaaacgaggaggatgctgaatggataaaaatgaattaaagaaattaacgccaatgcaatatgctgtgactcaaatgggggttacggaaaaaccatatagtggtaaatatgatcgatttgatgaaccgggtatttatgttgacgttgttagtggggaaccattattctcatcattagataaatacgatgcaggatgtggttggccagcatttactaaaccgattaagaagcgtgttcttacagaaaagcgcgatcaatcatttgggatggaacgaaccgaggtaagaagtaaggaagctgattcgcatctcgggcatgtctttactgatggtccaactgatcgcggaggattgcgctactgcattaattcagccgctttgcagtttatcccagttgataaattgcaagaaaaaggctatggagaatatctaagtttgtttgataaatagttaaaaatcaagggagtgggaaataacctcctcgacaaggcggttggctaagctaggatgatgattagcacggcatgggctgattatccttcgtacttagactcgagccttgtggttattttctacgttatctttctattgttcataaaagtagttgaggatgatgaattgtttaaaaaattcatcatccggtttttattttggactaggagttttttcccagcctccattctcgattttggttttaaattatttatccataattggcgattcatcccccacttctacaagtgggggatgaatcgccctcttaaagcacgttagtgctttttcttttgttctatgatatatttagtgtatatcaatatgagagtggtggtagtaattaaattggatcgtaatcaacgttcagtatacttgctgaattaccatttggtaatggtggttaagtatcgtagaagagtaattaacgatgaaatatctgaatatcttaaacatcgttttgtgattgtaggtcaatcctatggaattaatttacaaaaatggaatcatgatcaagatcatgtacatgttttgtttagagcaactcctcacacggagatggctaaattcttaaatgcttacaaatcatccagctctagaatagtcaaaaaacaattcccagaaatcaagcagtatctttggaaatccgccttttggacacaaagctattgtttaattagtactggtggagcactgttagaagttgtaaaacgatatattgaaagtcaagggagaaaataatggttctaaaagccgttaaaatgcgtatatatccaaactctgcacaacgagaccaactttggcaaaccttcggttgtgttcgttttgtgtggaatcaaatgcttaatatgcaaattgaacggcgtaaaaataatccagaggctaaatttgttaatgcctttggtatgaacaatctcttgaaacaacttaaagttgaatatccttggcttaagcaagcagaatcaactgctttgcaaagtgctaatcgcaatttagccgatgcttttcaacgcttttttaaaggtcaaaataagttccctcggtttaaatcaagaaaatattcgcaaagctacaattcaaagtacgttaatggcaacattagaattctagataggcatcatattaagttgccaaaacttggtgtggtgtattttagagctggacgtttgccgttaggcaaaattaagaacgtcactgttcgactaaatgttgctggtcaatattacattaccgttttagtggagagcgaaaatcaaactctccctaaaacaggcaaatatattggtggcgatttaggacttaagtcattactgaatctctctgacggctataaagaaccgttgaatcattttgaatctaaatacagcaagaagttgcaccattgggaaaactacgcagtcgacgttacttaattgctcaacaagctatcgcttgggatcatcacaataaggtgttaaagccatgccaactcgatgatttcaaaaactaccaaaaggcacggatcatggtagctaaatatcggcaaaagattgccaaccaacggttggatcagctacaaaaattcactactatattagttaaaaagtatgacatcattgtgttggaaagacttaatactaagggcatgatgaagaatcaccatttagctagggcgatcgctaacgctagttggtcaaaattagtagatatattgcaatataagtgtgaatggtatggaaaaaaactcattcagatcaatccatcctatactagtcaaatctgtgcaaattgtggtgaaagcaaccatcggttgggactaagtaaggctgaatggctaggaattagggaatgggactgcccaaattgtggcaaacatcttgaccgcgacattaatgcggctcaagtcattcttcaaaaaggtttggcgattcaataattagataatctaaaaaatacaggctcgggacgagccttggttaatagtcgtaacctctgcttgaaggctcgttaagaacttgtaaagtaagtatgcgatgttcccagaatctcccacttcaagcgttaaaccgcaggtttagctaagtgggagtagttcaattttcttctaacattgcatcataaagtgaagggcgaccacctaataaacgattaacataataggcgactaaagtaattaatgtcattggcaaaatttgttcaactgaaccaaccatttcagttactaataaaattgcgaccattgctttccaattcgttgaaagtgacatattagtgacatatttaataaaatcgtgactaccaccaagaatataagggttccataatccaacaggaataactaataatagtggaataatgttatgaaattcttttggaataaatgtgattttgctgtaccaccaagttaggtttagtgctgcaaattgaaaacggtatgccaagaaaccaatgacaacgccagcaacgattagtcatggataggatgcgactggtaatttagttgtgatcggaatatataggcaaggtttagtaccaaagaataaaaaaagtgataaatgcagaaacgattgaagaagttaaagcaggaatccaaattcgagaattaaaattatggatcatttcttctaataaaaacattgttcctgctaaaggtgcactaaaagccgcagataatccggccgcaacgccatactccatcaataaatatttatctttgtccgtaaagtgaaagaatttttcgttaaagcaggctccgatacaggcatcaatttggatacttggtccttcacgccctaagaaaagtcctggacagatagtaagcaaactagcaacgaatttttgccataatactggccaccaatgaatacgatgctttcctaacaaaacagcttttaattgggtaacgccagaacgaacaacatctgtttcataaggcttaacgatttttccgattaaccatgcaacgataaatgttcctaatatatatggaattaatagccaaggatgtttacccataaaaggataaataattgtcagtaaagtaagggtccggtcgataatccagcgaaaagccccgatcaccagaccagttactatcccaatagcaatactaacgccaaggtaacgagaaacaatggaggtgaatggttttcctaaaatgtcccgtgcccgtttgtgatataaagtattttcgcctttcataaatactgccttcaataaggtattttccctatattagcataaaaagagagtgaacaataacagtctacaagagataagtattgttcactctgcttttactatgaactttttaatttaatctgtgttggtgtttaccacccacaaataaacttataattgaagctactaaaattgcggaaaaacttacaacagcgattacgttacttaataatgacatcatggtaaacaccctttcttaataaatcttgttatcgctttcatcaactatattatagcattagttgaccaagattgatcaaaaaagaccttttattttactaattagggttgttatttcagcaactgcctactctttaaaaaagtcacgaataatttgtttataagctttaattgtagcaacgtaactcgaaatagttgtatattcatcagtttgatgagcaacgttccaatcgtcacatcctaaaattacaactggaaggtcgggacgatttaatgtaaatacacttgcgtcagttgcaccattgataatatcaagcttgatgtcatttggatagtttcgctgggcagcattgagggcaatttggacaaaatcgttattaggttctgtcgcaattggataaaaatcttgaataatttttagctctagttggaaaggagttgtgtggttaatatattcaagcgcatcatttaatcgatctgcaactttaacattattaaatgatgccgtagggcggatatttccttgcaaactagcactgtcggggatggtattaacttgagatccaccatcgataactgtaatactatgttggacttttccaaggtattgatcatctttggtgttatcaaaaaggtgtttttcttcttcgataaactttaacagcccttcaattgcattaataccattttgcgggtgagaactatgacaagattttccataactggtaacgcggtaattcatactccccgagtgagcaaaaataacattcccaccggttggttcgccgactactaatgcgtcaaggtcatcggcaactccttgcttttgtaaacgataagctccaggagtaccaagttcttctccggcggtagcaataaatctaacagttcctgatggcagttgcccagcttcttttaattcgattaatacaatagcctgggcagccagaccgctcttcatgtcagcagctccacgaccaaaaatataatcaccactaatttcaccgccaaagggatcatgttgccagcggtctggattaggtactgccacagtgtcttggtgtccagtgagcccaaggatttttttactttccccagtcccaatttccgcaatcaagtttgcacggcgatcaccaaattcatcaacttttgaatcgattccgtgatttgctaaaagtttttgtaagtagcgtgctacttcaacttcatttccattaacagaatggatttttattaaatcctgcagtactttgactttttcactgacttccataatgatccctcctatatgttagcgatcttggtggttaagcttcttggctaaaatatcgccaactacttgaatgattaaaacaaataaaagaacaagaatcgtggcgacaagggttacgtcgttgttaaaacggtcgtaaccgtatgaaatagcggtattacctaaaccaccagcaccaattgcaccagccattgcagtaaggctaactaaactgattagtgtaacggtggagacacggacaagttcagaacgagcttcgcggaggtaaacgtcaataatgatatcccagttagtagccccaatagcttgggcagcttcaattttaccgtggtcaacactttcaagcgcaacttgaacttgacgagcatagaaagcaaatacacctaatgaaagcggcactaatgcggcggttgttccaatctgtgttccaacaattaattgggtgaagggggcaatgaaagccaacaaaatgataaatggaattgcccggaaaacagatacgactttatcaacgatactaaaaacaattcgattttctaaaattccaccgggctcagtaaccacaagcgcaactccgaagattaatcctaaaattccaccgaaaatagcaggccagaaagtcatgtagatagtttggacgattgaagtaccccaaccattgtcaccaccccagccaagttgaattacatttggtataagattattcattccaaatcctccgatcatcaatctttgtgacagtaacatcattttcttttaagaaatcaatagcttgttgacacttatcagcatcgcccttgataactacaaacagggtaccgactggtgaaccagccaagacttcaatgtttccataaagcatacttgcttcaacttgcagcttcttatataactcgataatgattgatttagtcacgttatttgcatcgtagactaattgcagcaactcttcatcatcatcaaggtgaccaagatcaaatgctttaagggtatcgactgcggctaaggatcctcccacaaattgccgggttaagtcttgttgtggttggaggaaaactttctgtaaggtaccacgctcaatgatttgtccatattccatgacagcaatcttattcgctacccgtttaacagcgtccatttcatgggtaataaggacaatcgttaaatccaatttatcattgagccgtttaagaagatccaaaatctggtttgtattttggggatcgagggcagaagtagcttcgtcagagattaaaatttcaggatcgttagctaatgctcgggcaatggaaactcgttgttgttcaccaccggataattgaacagggtagaattcagctttatcctttaagccaactaagtctaaaagttcaagtgccttcttctcttttgcgtcattgtctaaatcagtatgtttaagagcgaaaagaacattttcaattactgaagtttcatttagtaaattgaagtgttgaaaaatcatgccaatttttcgccgcttttcttgtaattctttattgctaatttgctgttggtggtctttgaaaaagacagtaccattaactgttactgatccagcagagggaagttggaggaggttaatggttcgaactaatgttgatttaccagctccagaataaccaacaatcccataaatatcgcctttttctacttttaaagtaacatccttaacggcgtgaacaacctgttttcgttgcttaaaagttacgctaatgttatctaagtcaatgatcgggttcgccatattaatcctcctttatttattgaagttgaggttccaagcaggaatttctgcagttccgtatagtttcttaatttctcgttttgttttttcagtttggtaagcacgtacaacatctttgtaaatcttgttgttcttttcgctgtctttaacagcaatgatgttgacccattgttttgaatcctagttaactggttcaacgaaaattgcactcttgtaattaagaccagcagcttgtgcatagttagtattaacaactgcagcatcaacgttatctaacgaccgtgctgtttgatcagcggctaattctttaatcttaagatcgcgtgggttcttagaaattgaacttacggttgcgagctttgtgcccttctttaggtcaatcaaaccagcattctttaatgcgaataatgcccgtgattcgtttgaagcatcatttggtactgcgatcgttccaccattaggaatttcctttacactcttgtattgcttggagtataaccggattggagtaataaatgtatcgcctaaagaaacaagatcagttttatgggctttattccaagtttgtaagaataacttgtgttggaaggcgtttaagtcaacatcgccattttccaaagccttgtttggttggttgtaatcagtgaatcgtttgaattttaaagtaacattgtacttatctttagcggttttgcttactgaattccaaatttcatcatcttgttttgaaccagccataatcccgacagtaacagtccgttttgcttgttgttgcggacggataaaactaaagtatccggcaataacaacgataagtgcaactactgaccaaataatgatatttcttcttttctttctcttcatagtaaaaactccctttcaatcaattaaatattttcgttggttaattaaaacgttaacttgctagtaaataaaaaagcactcgtccctttattcaaaggacgagtgctcgcgttaccacctttatttgctgaatcttcacagacccagcctcagtaggttactctaataaaacaattagaattacctagcactaataacgtgtgctaacccgttatcgactaacaatcatcgataccattccaagcccatcttcaatagttacgcttgcttcttcacaccacccagaagctctcttgtaagcctcgctacttactctgcttttcgatatgttttaacgttcaattaattattatgtgttccattataatgattctctaatttttgtcaacgcattttttaatttaaattttgttttatttgggtcatcaatcgttttttattttgcctatctatagtaattaaaaaataattatgctaagattaaaaaataattaaaaagaaattgaaaggggtcatagtaatgacacgaaaagttggagttatcggaatgggtaatgtggggtcaacagttgcccactatattgtggcaatgggttttgcagatgacctagttctgatcgacaaaaacgaagcaaaggttaaggcagatgcacttgattttgcagatgcgatggctaatttgcctttccataccaatattactgttaatgattatagtgcgttgaaggatgcggatgtaattgtatccgcgttaggaaatatcaaacttcaagataatcctaatgctgatcgttttgcggaacttccatttacccgccaagaagtaaaagaggttgcacaaaagattaaggaaagtggctttaacggtaagattgtggctattactaacccggttgatgttattacctcgctctaccaaaaaataactggtcttccgaagaaccatgtattaggaacagggaccctgcttgactctgcacgaatgaagcgggcagtagctgaacggcttaatttagatccgcgttctgtagatggttataatcttggagagcatggtaattcacaatttacagcatggtccactgttcgcgttcttggccgtcctttaactgaattagcagataagcgtggattagacttagaagagcttgataaggaagctaagatgggtggctggactgtctttcaagggaaaaagtatactaattatggggttgcaacggcagctgttaagcttgtcaatgcaattttatccgattcattaactgaattaccggtatcgaacttccgtgaagaatacggagtctacttgtcttacccagcggttgttggtcgtgatggagttgtagagcaagcacaacttgacttgacagaagaagaactgcaaaagctgcaaacatcagccgatttcattaaggaaaaatatcaagaaagtttgcaagcaaaagattaaggaaaatttaaataaagaaaatagactagcataaaaaaattatgcatggtagaattgcttctatacttaacaaataaaagtggcgtcatcagataaatttggtggcaccacttttattctgtaaaaatatagaaaggaaatatatcatgacaaaagaagtaaagcgtataatctttgtagttcttttttgtgagtttttgatttgtctcggaatgagtcttatcttcccagttgaaccattcattaaaaatgaataccactttactgcctttgacatgggagtgatgtcttccctatttgcgtttgtgcaatttattgcttcacccattgttggtcggatttcagataaagttggacgaaagccaatgttagtatggggattgctaatatttgcgattgctgaatttgtttttgccttagcacagcatttatggttatttgacttatcgcgggcggtagatggattatcagcagctatgtttgtgccaacatcaatggcattagcggcagacattactagtgaaaaagaccgcgccaaagttattggttggctatcagcggcttttagtggaggattgattttaggaccgggccttggtggaatgttagcgcatgtaaattataaattcccattttgggttgctggtattctaggcttgattagtacggttgttgcttggcgctttttacctcatgatgaggatgaactatttaagagtgaaactaaaaatcctgaaaatgaactattgactggtggttggaatcagttgaaacaaattatgaccccaatactaatcacgctctttggaatgatctttgtagcttcatttgggttagcaggttttgaaagtatttatagtttgtatgtcaatgaagttcataattttgacttaaacgcaattgcgcttgttttaactctcaatgggattatttcgcttattttgcaagtctttttctttgatcggctagttcgctggctgggagaagttcgcctaatgcgatatagctttttccttagtttagttggaacgatcatggtaatttatgatcacaatcattggcatatcattattgcaaccttgtttgtttttgaagcattcgatatgttacgcccaacaattactacattattaactaagatgagcaagacaaaccaaggattattaaacggggtaaatatgtcattaacgagtgtgggaaatgttattgggcctcttattagtggctatttattagatgtcaattatcaatacccatattggttcgtatcgatattcctaattatttcctgggtaataacacttgttttaggacgggaaagaaaagcagctgctaacgattaaatatttaactttattaagaaaatagcgaggaattaggaaaaataaaatttttctaatttctcgctattgttgtatttatgcttaattttgttgtgcctgttgcaatgcatccttggttgcttctttaatcgcacgacttgttgcactggctccagtaataccatcaacgtctgcactattagctgcaataattttgccgggaagttcatctaaagcccatttgcccatttcagattcgtggtgtttgattacttgtaaatcttgaatcttgtcatcttggtaggttaataagacttttaattcaccaccataagcactaaagccatttccaatatattgggttctttctatttctctcattttattatccatttaaattacattattttgtcctgttacgcagagtgataatagcgggcaagtctgacatttaggatttcttgccgtacagacatacctaccccaaaaaatcatactatgatgagcatctaaccagtgttcagggggaatagttttcattaatttcttttcaattgcaagaacggatgctttgggctcaactattctgagacggcgggcaacccgactaacatgggtatcaactggaaaagcaggaatattaaagcattctgcgaggaccacatcagcaactttccttccgactccagataaggtcattaattctttgagggtgtggggaacctccccgttaaagtcagtaacaatttgttgagaagttttgactaagaatttagctttatttcgataaagccctaatcttttgatataaggctcaacttctgcgggttcaatccctgctaaatctgctggcaacggaaaacgagcgaatagtgctggcgttacttcattgacagattgatctgttgactgtgcactcaagattgtagccaaaagaaagtggtagtttgtgtcagcaatcaaagttgttcctgcttcgggaaatgtttgccgcatgaccttgattgagtaacgaatttcatctggtgataacatataaaatcactcttttcgaatatgattataactattttaacccgaatgattaaaatagcgaagggtaataatctcattttatactcattaaattattatttgtaaaattgagggttagcaatatgacatcaatttatgttaaagaaaaaatgtttaataaagatataattgtagaaatcgctttctttgattaatttaaataaacgattgacctagggaaggcgccttggtaaaatgtattaaagattttcttataattctaatcaaaatttaattattcagaaaaggaggataattatgagtttttggaaaacaattacacgtaaagaagacccgcgtgtttatgataataaagacggtcatttagttcgatctttgaaggtgcgggactttttagctttaggtgttggaacgattgtgtccacttccattttcactcttcctggtgaagtggccgcaatgcatactggaccttcagtagttatctcttttttaattgctgcgatcgtggccgggttagttgccttcgcctatgcagaaatggctgctgcaatgccgtttgctggttcagcctattcatggattaacgtcgtgtttggagaattttttggttgggtcgctggttgggcactattagctgaatactttattgctttggcctttgttggatctggtctctctgctaacttccgggcattatttgttccgcttggctggaagctgcctgcttcattatcaaatgcttttggtacagaaggcggagttgttgatattgtttcagttgttgtaattattttagtagccctcttaatttcacgcggggtatcacaagctgctcgtgttgaaaatcttcttgttattcttaaagtttttgcaattttactttttattgttgttggtttaaccgctataaaagcaagcaattttatgccatttattccacaataccatgaaacagctaatggtgcatttggtggttggcaaggtatatatgccggggtatcgatgattttcctttcctatatcggatttgactcaattgctgctaattcagcggaagcaatcaatccacaaaaaacgatgccacgtggaatccttggttccttagtaatcgcggttgttctttttatagcagttagtcttgtactgattggggtattaccatatcaacaatacgctaacagtgctgaaccagttgggcttgcattacgtgcagctcatcatagtggtgtagcaactgttgttcaaacaattgctgttctaggaatgtttaccgccttgattggaatgagtatggctagttcgcggttgatttactcatttggtcgtgatggaatgctgccaaaatggcttggaaaacttgataaacataatcgaccaaaccgtgcactttggacacttacaattggtgttgttttgatcggtgctttcttcccattcgcctttctttcccaattggtctcaactggtacgttgatcgcctttatgtttgtttcacttggtatttatgcattacgtcgtcgtgaaggaaaagatattccaaatccttcatttaagatgccattctatccagtattaccagctcttggttttcttgcttcattacttgtgtttatgggattagattaccaggcaaaactttacgctggtatctggtttgtctttggcttaattatttactttgcttatggaatgcgtcactcgtcaatggcaaagaaagaagatgaacaaaatgttaaaaacgaaactgaagcaggagaaaacaaatagagatgttttattagaagaaaaaaatgcatttgcaactgctgcccggattaagtactacgatattgtattagatcatggacggggggcaatggttactgatattgaaggaaatgattatatcgatttgcttgccagtgctagttcgactaatactggtcatgcgcatccgcgagtagtgcaagctattcaagaacaagcagctaaaatgattcagtatactccagcgtactttgctaattcacaagcagcgcggttggcacctcgattagcagaattagcgccgataagcgggccagttgaaatggtatggggtaattctggttcggatgctaatgacgcaattattaaatttgcgcgagcatatactggacgccaatatattatttcctttacgggggcctatcatggttcaacttacggttcaatgagcttgtcaggtgtttcattaaatatgacgcgaaaaatgggcccaatgctaccaggcgtagtaaaagtaccattccctagtccctgggaacgattaactaatgaaagtgacgaagcgtttgttgagcggatgtttcatcaatttatgctgccttttgaaacttatttgccagttgatgaagttgctgcaattcttattgaaccaattcaaggtgatgggggaattgttaagactcctcctgcttatatgcaaaaggtatacgaatttgctaaagctaatggaattctctttgccattgatgaagttaatcaagggatgggacggactggtaaatggtggtcgatccagcattttgggattgaaccagatttaatgtctgttggtaagtccttagcttcgggaatgccgcttagtgcaatgattggtcgtaaggagattctggaatcattaggtgcgccagccaatgtttacactacagctggtaacccaattacggctgcagcagcgaacgcgaccttagatgttattcaaaatgagcatcttttagaacgttcacaacgccttggcaaaaaagcagctgaattttttaagcttgaacagcaaaaatatccttttgtgggtgatgttcgaatgtatggacttgatggtggtattgatatcattgatccagttacgggaaaaggtgatacagaagcaacaaccaagctaatgtaccgcatctttgaattaggagcaattatcattagtttacgggggagtatacttcgtttccaaccaccattagttattacagaaaaagaattagatcaagcttttgcgatgattgatcaagcattcgcggaattagccgctggtaaattagcagctcccgcaaatgcagaagagttaggttggtaactcttgcaatttaagaccatcttcgggtatactttaagcgccatcttagctcagctaggtagagcacatccatggtaaggatgaggtcggcggttcgaacccgctagatggcttaaaatgaactaagaaaagagatttagaaaaacgattcgtttttctaaatctcttttcttctttataagaatatgaccttgctagtaatataattaggattgaaattacggctatgttaaaatcaaaattatgtagcattagcttaattgataaattggaggaaaagaaatggaatttattgcagtgttggcggggttattgcttgcaacccagatcgtagcacacttatgtcgtcgcgttgagattccagaagtgattggacaaatcctagttggaatcattgcaggacccgctgttttagattgggttcatctaaattcaatgatgaatgaatttcaggaaattggggttattatcttgatgttcatcgcaggattggaaagcgacctatccttactaagaaaatacttgaagcccgctgttgttgtggcgcttttgggggtaattgttcccattgtaattatgggaccagtaagttatatgtttggctttactaagcttgaatcactttttatcggggttatttttgcgacaacatctgttagtatttcagttgcagtattgcgtgaatttaatcgcctagatagccgagagggggcaacagtgcttggagcagcggttgccgatgatattattggtgttatcttgttaagtgtgatgattagtgtaatcaatggaagcagcaatagtggccacggcaatggtcagcctttaggaattgtcctcttgatgcagttagtgttctttggtggaacttacctattaattcgttggttagcaccttacctgattcatatgagtgatcgcctattaacagttgcttcaacgtcggtaatggcgatgattatctgtttaggcatggccgcaattgctgattatgttggcttgagtggggctgttggctccttcttcgccggaattgctgtggctaacaccaagcataaagaagttgttgaccggagttttattccaattggatatgcaatgtttattccgctattctttgtcagtgtaggcttgaacatgcgctttgataatattggtgaatcgtttgtctttgttattgtaatgacaatccttgcatgcttaacaaaactgcttggatgtggagcgggtgctaagctatctggctttagcatgcccagttcttatattgtcggtagtgggatggttgcccgtggtgaaatgggattaattacagcccagattggttatgaagcacatcttctttcgccaatgtattattcagatgtaattaccgtgattattatcgcaactgtattagcgccatttattttaaagaatgcattgaaacgatcagccaacgaacttgagtaaagggggcttttgatggaaaatcatgaacgagaaacggagcaagcgcgggttgataatgttgaaaaacaaattgaccaacagatagctgctaccactaaagctgttgaagatgctcatcgtgaaacacgggcagttgaacgtaattatagtgaaaatgcatctattaatcgttatgaagttgatgatattgctgaatctcggtcaatgattgaacagcagcgacaattggtttcacgagcagcggaaagtgaatcaattctaaagcaccagttaagaactttgaaaaacttaaaagggtcaccgtattttggccggattgatattcaagatcctggtgaagataagagtgaaacgctatacattggtacttcttctttaatgaatgaagataaaacagactttttaatttatgactggcgggcaccgatttctggggtttactataatggtacccttgggaaagtcaattatgaaacgccagctgggatgcaaaccacagaattaaaaaagaaacgccaattcactattaaggatggcaagatcactaacatgtttgataccaatgaaacggttggtgatgaagttttgcaagcagctcttggaaagcaaaatgaccagtatatgcataatattgtggcaacaattcaaaaagagcaaaatgatattatccgtgatacgcgtagtgatcttttgctagtacaaggagtggctggttcaggaaagacttcagcgatccttcagcgaattgcatacttgctttatcatagtcgaacagaattgaatgcggatcagattgtcctctttagtcccaataatttatttagccactacatttctgaagttttgccaagtcttggtgaaagaaatatgcggcaagtaacattagaagggtttatccggcggcgttttgaaggcttgcaagtagaaacattatttgatcgctatgaagaacggcaaaaacctgaaaatgcttctcatgttgttgctgactttattgaaagtgaatcttttatgacgtcaattgcacattatgtcgagaaaatgacaattgaggatttgcagtttgctgatattcgttttaatggtcaagttttcttttcagctgaccacgtcaaagatctttataaagaattaccattgacgatggctcctgctgataagttagttcaattgaaaaataagttaattcgtgaattacagcggcgagttaaagatgaagctaaaaaagattgggtagctaaagaactggattcacttgatttacaacaattgcacaatctttgtggtaagaagtcaattgatgactttaaggatgaagatgagcaatatgtttacctttcgcggcgtttagctaaacgacgcttacgtgtgattgcagatgcgatctataataattactttctcgatttttataatcaatataataagtttttgcatcaagttgaggtacctaagacaattagtcagcgggaatgggcaacaatgattcttgcttttcaagatgagattgaataccatcggctggaattaatgcatgcggcacctttgatgtatctgcgtgatttgatttccggtacaggacaaaatcgttcttttcaatatgtatttattgatgagatgcaagattattcaacagcgatgttaatctacttaaaacacgcctttccccaagctaagtttacggtcctcggtgatagtgaacaggctctttttaagccattgcagttaccggaagagttattaaacaaacttagtgggatattaaaggctaagcggcctaatttaattgctttacggcgaagttatcgttccacgacggagattactaattttgcgaaggccttgttgccggatggagataagataatttctttcactcgccatggaaagaaaccacgcttgttagttcgttattctgataaagagagtcagcaaagcttgttagatgagacacttaaactagctaacgaacatgaaactgtagcgatcttaaccaagaatcaagagcaagccgctgttatttatcaattacttcgccggcaaaaggttgaaaatattcatctcttagataaggatgcaagtgaattgccaaaggggatcttaattctcccaatttacttagcaaaaggactcgaattcgatgctgtccttgctgcggatgtctctgctaaaaacctagctaatactgatgaagtcggtatgatctatacaatggcatcacgggcaatgcatgaactggtccttttaagcaacggttcagttagcgacgcaattaacgagaaagctgggcgtcttttaacgattgaatatcaattgccaaataaaaattaaatttttctattgtctaaaaacgctttcaagaagtgtcgacttatgataatctaatggagtagatatagaaaaaggagatgcttcgccatggttaaagacgaatacacacttgtactagtaaagcctgatggggtaaagactcgtcatattggagatattattacccgtattgaacggaaagggtataatattgaagctcttaagatgattgacccatcagaaaaaaagcttcgtcaacattattttgataaagttgacaaaccattcttccctgaattgttagaatacatgacagaaggaccaattgtcggaattgttgtttctggtactaatgtaatccaagcaattcataacatggcaggagctactaaccctggtgaagctgaatggggaacaattcgtggtgactatggtcgtgaatggcctgatggtaacttgcgaaatatcattcatacgtctgataacgttaacagtgccactcgtgaaattggtatttggttcccagaatttgatattaaagataaacagtagaaaataaaaagactgagagaaaatttttcctctcagtctttttacttttcacttgccctttgttggcgtttaatttttcgttgtactgccaaggtattgcgttcccagaagactccgtcagtgtagccttggatgctaggatcatcttttatttgattaagtcggtactgtccccatgcacaatatagaagactttgctcgattccaagataacggcggttaagtttagcagcagtcactaaactcgaaccggaaccagcaaaaggatcaaaaatgaagtcattaggattagaactggcaaggataatttttgccagcaatttctcaggcttttgcgtagggtgaccagtattttctggcattgaccaatacggaattgaaatgtcatcccaaaaattagacggcattgtatcccgaaagttaccatttttagtagcttgccagtctttagctaccccatcttgacgataaggagctaccacctgtcgtcgttgcttaacttggtcgacgttaaaggtgtaatcactcgggttcgcggttaagaaccaaatatcttccatcccatttttccaatttttcagtgaaccccggcccttttctcgttgccaagtaatccgattttgaattgtaaaatttttttccaggatcggtgctaaggccatgctggttgcccaatcagaaaagacatagatactagcattttcttttaataatggttttaagaggtcaatccacttttgcgtgtaagcttgatattggcttgtggacatttttttaaagcttaaaccatcatactgtttattaaggttgtaaggagggtcaataagggcgagatcaacctggtgtggtgataatttagtcattaccttgaaggaatccccgttgataatcttatcggatattgtctggagattatcagtaggctgaataatttggttgaggagctcaggtgaagcttcctccagcgtgaaatcgattgttttatttctttttgagcgcatatagaccactcctgttcgacgtttaatattattatacttgtcatattcaggattgtcttgcctttttagtaggagttggattaaaattaattatattaagtagcgcgagccttagcgaggggcggtcggtgaaaaggtccccaaagtgcgaaatggtcacaacaagatacacaatgagcggcaataatgattgcaatttaggtggcaccgcgcgaaaagcgtcctatttagtttatacgactaagtagggcgttttgtaatttaggaggaatttaaaatggcagaagaaaaacacgttattttaactggtgatcgaccaactggtaagttgcatattggacactatgtaggttcgttaaagaatcgggttgaattacaaaatacaggtaaatatgatacatttatcatgattgctgaccaacaagcattgaccgataatgcccgggatccggaaaaaatccgccgtaatctccatgaagttgctctggattatttggcggttggaattgatccaaagaaatcaacaattttggttcaatcacaaattccagcattgagtgaattaacgatgcactaccttaacttagtaactgttgcacgtttacgccgaaacccaactgttaagactgagattaagcaaaagaagtttggtgaaagtgtgccagctggattctttacttacccggtaagccaagcagcagatattacagcatttaaggctgatacagtgccagttggtgatgaccaagaaccaatgcttgaacaaactcgtgaaattgtgcggacattcaaccgtatttaccaacaagatattttagttgagcctgaaggggtattcccaccaaagggtcaaggacggattccagggctagatggtaatgcaaagatgagtaagtcgcttggcaatgcaatttatctttctgatgatgctgatacagtgcaaaagaaagtaatgtcgatgtatactgatccaacacatatcaaggttagtgatcctggtcacgttgaaggcaatactgtctttacttaccttgacatctttgatccagacaaagagcaagttgctaaattgaaggagcaataccaagctggtggccttggggatgttaagattaaacgctacttaaatgaagttcttgaagctgaactttcaccaattcgcaagcggcgtgaagagtatgcagctaatattgattatgttgatcaagttcttaaagaaggctcagcacgggcaaatgaggttgcaaaccagacgcttaaagaagttcgtgatgcaatcgggattaactactttggctaaaaatataaactaaaaaagcgaggctgctaggaaaataagtttttacctgagccccgttttttttcgtgtctcccatagcagaacatggtaacataaaagagatgtatttatacgaaaaataattaattaaagcggaggtgaaaatggtggaaaacctcgcgattgtagacctcggctcaaactcggcccgaatggcaataacagaaattgctccagatggacgatttcgtgaaattcgacgtgtaaaagaaaatacacgtttatctgagggaatgggacgagaaaaaatgttacaagagagtgcaattgaacgcacaattgcggctctaaaacgatttaaaaaaatctaccaagagattcccaatattaaagttcgtgcgatcacaactgctgcagttcggcaagcacgaaatcgtcaagagtttttgaatcgtgttcaacaagaagtcggtattcatctacaagttttatctggtaaaaaagaagcctattatgattatctaggcgttgttcggacattgcgacttaaccactgtttgattctagatgttggtggagcaagttgtgaattgatattggtgcaacagcgaaaagcacgtaatttgatttctattccggtgggagctgttaatttatcagaacaataccacttaaatggctatgttcgttcggctgacctttttcgtgcgcaggtagcgataaatgaacgattgaccaaaattccttggttacgatatacaacgcgtgttccgattgttttattaggtggtgctaaccggactttggcgcgtatgactcaatcctatcatcaccatcaccgccgaaacggttcgattcatgggtatcaactctcctcacgagtagtatttgcgacttaccgtgaattattaaatcggaacttggcccagcgtaaacggctgactggtctagaaccggaacgagcagatattattattggtggaatgctgcctcttgtaacccttttgcaacgcaacagtgatggccgggttattttttcagagagtggtgtccgcgaaggaatcatcactgaatatgtaaatcaaaggaagcgacaccatgactgattggcaacacggtttttataagttatctgccgatgatcgacgtcaacaattagcaaaagctcgtcacctatcccctatggaagagcaagtattagcaaatacaagttcagatttaggggatgagttagtcgaaaattatattactgattattctttacctgaaggagtagccttaaatataaccgtaaataatcgtccgtatgttgtaccaatggtgattgaagaaccatcagtcatagccgctgctagcaatggtgcacaccgggtaagtaggtcgggaggatttactgctcctcggcaagaccgacaattagtggggcaagttgtgttagatgatgtgaccgataaagcagcagttaaagcatggttattagaacaccaagatgagattttaacaattgctaaccaggctcatccctcaatgcaggcacgaggtgggggtgcgaagtcgatgaaagttcgcactcctgggaactttattagcattgacctggggattgatgtttgtcaggcaatgggcgctaatagtgtcaatacgatggcagaagcggttggaaaatggttaacagaccagggcttccatgttattaccgcaattttaagcaatcttgcaacgcagagtctgcaagccgctacttgtaaagttgattttcgatacttagcaactccggagatggatggtaaagaggttgctcaacgaattgctcgtcttagtgatcttgcacaagttgatccttatcgagcagctacccataataaaggaataatgaacgggatcgatgcggtcatgatcgccagtggaaatgactggcgggcaattgaaagcggggcccatgcctatgctgctcgtgatgggcaatatcgaggattaagtacttgggaaattcaggacgactacttggtaggaaaaattgttcttcctttaccagttggtgtaattggtggttcaattggattaaataagatgacaaagataaactatcatattagtcaaattaaaagcgccgaagagttagcagcagtaacagcaagtgtcggattagcacaaaatttggctgctttgcgggcattgacaactactgggattcaagctggtcatatgaaactccaatatcgctcattagcggcaagtgtcggagctacgccagcagaagtaccgttagtggtagctcaattaaagcagcaatcacatgttgaccaagcacttgctaaagaaatattatcaacgatcagaaaggaccaagttaatgactgaagagagaattacactaaataaagaaaatcaagcactccttgatcaggttaacagtctatatcctgaaggtagtgtctttgttcagtttcatggtgacaagtcaggatacgttcgccatgaccaagcaactcaacaaactattcctggtgccttggttattattgtgactgacttaactgccccaaattacactgcttcacatgagttattgcaccttttgatgttgctaaaagggtttccacaaatctttttccaactatctcttggtgataaggaactcgatgaacagatgatgattatgtcaacggatttgtataatattgccatgcatcgagtagtggttgcagaacaacgtaagcatggttttattaccgatgagattgaagagcagtatctaaaggggattgaacacacattaactccggaaaaagaggaagatgatgaacggacgttacggttgttaacccttttggatgccttggtcttttatggtgatcacctctcaaagtatgaaaaaactttagcagaaaagtacccgcttgcactgaccgcggcaaaaaagatgtatgctgagattacaaagaagccaattaagtcaccattcgatatgcgccggtcaattgttaagatttattctttgtttgatcaacaaatgcaggaatggggcttaccagccttacataataatgaatatacaactctctcaccggtattaagtgcccggcaattacgtttagagatgcgtcaagtttttgaaatctatcactctgatatgaaagaacgggggacagataagcgcgcctatgttggtcttcggcggagtgatggtcaaaattcgtttactcttccggcaccggctcaaaatgcgccagaagaatttaagaagatatatgatcaaccagtgaaggaatttcttgaacagaatagcattccatacattgtaaggaagtgagttagatggatgcgacgattcaaaaaacatttgacgacgcaaaaaatattgtctttctaacgggagctggtatctcaactgcttctggtattcctgattttaggtcagcaaacggtttatatacgcaaaatcggaatgccgaatattatttaagtcaccgttattttgctagtgatccagaaggcttttacgaattttgcaagcagaatttatattttccagatgcaaaacctaacgtaattcatcaaaaacaggcagcgttgacgcaacaggatcgcgcgacagttataacgcaaaatattgataacttatatgaagaagctggaacaaaacacttaattgattttcatgggaacctcttccacgtttattgtgaaaagtgtcatgaaacagttccggtgagtgaatatttgaatagtcgcttgcatcaaaaggataatggtcccttgcgtccggatattgtgttatatgatgaaggaattaagcaagaggatattgtcaattctgtcaaggcaatgcaacaagctgatttagttgtgattgtgggtacttcgatgaaagtatacccatttgcgggcttgctagattaccgcaatccaaacgcaaaggtgattgctgttaatcagcagttattgcaatttccttttaactttcaaatggttcaagatgacgcaacaaaattctttgacgaattaaaagtataaaaaagaagctgcagttgtctgaggacaatttccagcttctttttgctccagtagttattcaaagaaaacgaccttcccatcaactttgaatgggagtgctactaaatgagaacccttctttttagtagtagccttttcttgataaaaaatgtgacgaatacctttgttctttagtagcatttctgatcgctcctttcatattgttcacttgtaaaataacatgttttgaacgttttccctagagaaataatgaagtatgagaaacgatttcattttaatgggtgaaaatgatgcataatccgttcgttttttactacaaaaatgaataaaagcgataaaaacaacgattcaagtccttgaaaaatgaatatagatttattttgtagtgtataagaatttgctaagtaatttgatgaggattttggggtacgaaagagaggattaaagatgaaaataacgatggggatgacaacttggacagagcatccagtactcattcatgatgaacaacgcccagtaaggcttgatgagtatgctcaacattttccagtcgttgaggtggatacttttttctatgctttacctcagatatcaacgattcaaaactggcttgctactgttcctccaacttttcagtttatcgttaaagctaaccagaaaatgacactgcatcagcgaaaccaggaacgtggcgaattagaacaggtctttcaacaatatcgccggataatctcccccttggtagctgctggtcaattaaagacgatattatttcagtttcctccatattttgatgcaactgtgcgtgatttttcttacttacgattaattcgggaatggttaggaaacttgccaattgcagtcgaatttcgtaatcaaacttggtataagaaagaaattttaccgtcagtcttagacttctgtcgtgaactcaatttcacattagtggccgctgatgaaccccataatacgccaacgtcagtaccatttgtgcttgcaacaactaatcccgacttagccatgctgcgccttcatggtcgtaatcgcaaaggatgggaaaatcaaggaaaagaatggcggaaaacgcggactttatatcgatattcgacggaagaactccaattctttaaaaaacaaattgagtccttgcagccgcaacctaaagaactctgtgttatcttcaacaacaactcagctaaagatgcagcacccaatgcattgagtcttcaaaaaatgatgaatattgaattcgagggcctggcacctaaatcgccagaacagcttgatctgttttaggatggagcaagccctaataaaatgctatactaaatgttaaatcttaattagtaatatcttagaaagaggggcttcatatggctgaacaaaaaccaacttattacattacaacaccaatttactatccatctggtaaactccatattggtaattcgtacacaacaattgcatgtgatgcggaagcacgttttaagcgtttgatgggttatgacgtattctacttaacaggaaccgatgaacatggccttaagattgaacaaaaggctgaaaagctcggcatgaagccacaagaatacgttgatcaaatggctgcccaaattaaagagctatggaaaaaacttgaaattacaaatgacaagtttattcggacaactgacgactaccatgaaaaagctgtccaaaaggttttccaacaattgcttgaccaaggggatatttacaagggtaagtatactggttggtactcagttgatgatgaagaatacttcacagaaagtcagttagcagaagtttaccgtgatgaagacggtaatgtgatcggtggaaaagcgccatcaggtcatgaagttcaattagttgaggaagaatcatacttctttaagatgagtaagtatgctgactggttaatgaactactataaggaacatcctgattttatcgaaccgcaatcacggatgaatgaaatgattaataacttcttaaagccagggctagaagatcttgcagttacgcggacatcatttgcctggggggttaaggttcctaatgaccctaaacacgtggtatacgtatggattgatgcattatcaaactatattactgcgctaggatatggcagtgatgatgatagcctcttcaagaagtactggcctgctgatgttcacatggtaggaaaggaaattgttcgtttccacacgatttactggccaattatgcttcatgcgcttggcttaccattgccaaaacacgttattggtcatggatggttaacaatgcgtgatgggaagatgtcgaagtcaaagggaaacgttatctatcctgaaacccttgttgatcgttacggccttgatgctacacgttactacctattacgggcaatgtcatttggtaatgatggcgtctttagtccagaagactttgttgataaggtaaactatgacctcgctaacgatctaggaaacttgctcaatcggactgttgcgatgattaataagtatcaaaacggcaaattgcttggtactaatgatgcaactactgattttgatgctgatttagaacaaactgctagtgatgtaatcgctgagtataaagaactgatggacaaaacacgatttgctgaagcattggcagctgtttggcagttggttagtcgtgctaacaagtacattgatgaaactgaaccatgggtattagcaaaagatgatagtaagaaggatgtattatcagatgtgatgacccatctagcaaagagtttgcggattattgcagccctaattcaaccaattatgccgcatgcaccaaaacaaattgttgaacaacttggaattgaagggactgacttatcattaaccgatcttcaatttaatgatttcccagcagaagctcaggttgtcgccaaaggaactccgatcttcccacgattggatgtgaaggccgaggttgaatttattaagagcaagatgacagtaaacgaaaagaagaagggaagaaaggcaatggctgaagcaaaagaaaaagcccaggaagcagcacaagaagaaaaagcagatggcaaaaagccaattcggattgatgtctttgataaagttgaattgaaagtagctcaaatcactgctgccgaccatgtagaaggtgctgataagcttctgaaattccacatggatgatggaacagaagaaggtcggcaaatcctttctggaattgctaaatggtatccagatccttctgttttagtaggtaagaaagttttgattgttgctaacttgaaaccacggaaaatgcggggcgaattaagccaaggaatgcttttgtctgctgaaaaagacggtaatgttcaagtagtaactgttcctgacaatttagtacctggaatgggcgttgaataaagtgagtaatcatcaacaccagcaattggtttatgattcccatacccacctaaatgacgatgtgttttatgatgatgtgcctgcctttattaaccgtgctgctcattatggcgtgacggagatgaacattgttggctcgaaccagctattgaatactcgtgctttaaagttgggacatcagtacgataacctgcatccaattatcggttggcatccagaagatattgctaattggaatagtgaaaccaagaaagaattacgccaacaattagcagatcccttagtcgtgggaattggagagattggcttagattattataatgacgagcattctcctcaccagcaacaacaagaaatttttgctgaacagcttgagtgggcgcgagaacttaaattaccggtctcaattcactgccgggatgcactagctgatgcatatgaaattttgcggaatgcccacgtcgatgaatttggcggggttatgcatagttttaatgggacttcagaatgggcagagaaatttatggatctcgggatgatgatttcatttagtggtgtcgtaagctttaaaaatgcgacagaagtccatgaagcagcattagttgttcccctggaaaagatgatggttgaaacggatgctccttacctaactccgctcccataccgaggaaagcaaaacgaacccggttttactaaatttacggtggatgcaattgcagatttaaagcaggttgatgctggcaaagtggcatataaaacatttacgaacgctcgccacttatttttggaaaatgaagaaagaggcctatgattagaataaaagaagttatagttgttgaaggtaaagatgatactaagcaaattttaaaagcggttgatgccgatacttacgaaacaaatggatctgcaatttcaacggctgacttggcaaagttgaaaaagttacaagcaagccgaggcctaattgtttttactgatccggactttaacggggagcggattagaaaaataatcagtgaagccattcctggcgttaagcatgcttttattaaacgaaaagatggtgtgccaactgaggctcacggtagcttaggggttgagcatgcaacgccagcaattataaaatcagctttggagcacctttatactcaaacaacgacacctcagcaagtttttaagcgagaagatttgcaaaaatggggattaacaggtcaagcagattcacgaaaacggcgtgaaaagttagggcaattactcggaatcggttatggaaatgggaaacaattgattcaccgtttaaacatgtttcaagttgaccgggcaacatttgaaaaagcgattaagcaaataaatcaggaggcagatcatgagtaattcaccagaaattggtagtcgaacacgtacccgcgcgataatggaaaagtacgggatccgaacaaaaaagagtttcggccagaatttccttactgatttgaacgtcttaaaaaatatcgttgaggcagcagatattacagctaatgacaatgtaattgaaattggtcccggaattggtgctttaacggagcaattagcacaagcggcgggagaagttttagccttagaaattgatcaagatttaattccggtattaaaagaagtattatcaccatatgataatgtaaaagtgattaatcaagatgtccttcaagctaatttaccagagttaatcaaaaaggaatttaaggatcctagtcgaccaattaaggtggttgctaatctcccatattacattacgagtcccattctaatgaatttgctggctagtcctgttgagtgggcgacgatttgtgtgatgatgcaaaaggaagttgctcaacgactcactgctaaaccaggaactaaacaatatggtgcgttgacattagcgattgaataccaaatgcaagctaaaattgcttttgatgtttcacggaaagtattcgtgccgtcgcctaatgttgattcagcaattgtggtattaacgccacggacaaatccgcttccggttcagccttttgataagcaaaaattatttggctttatccggggatgctttgctcatcgtcgcaagagtctttggaataacttgcaaagtgtaattggtaaggatccagcggtaaaagagaaaatgactgctgtcttagctcagctggatatttcgccacaaatccggccagaaaaattaaccctcaaacaatttattgaacttgcgaatgctcttcaccggcaaaatctcttgtaaaagatggttgaccgttataaaatattatggtacaattttgatttttgtgtaaaaaaagagtatgctagtctacagtgaggtgaaggagtcgtgcctaatagcattgtagaaattaagaagaagctagatgaacggattggcgagcatgttttagtaaaagcgcaagctggacgtaaacgtattaccacccatcacggtattttaagtaagacttatcctgcagtatttgttattcatttaaatgatgaacaaggaacattggatcgagtttcctatagttatactgatttgttaacacgaaatatttcaattgccttcgatgaagcagaataaactgataatttaaaattcatatttataaaataataggagtgagtaaaaatacctttcaacaggaaggcagtttttattcactccttttgctttaggaatagttaggaaacagtagttgcaaggattatagttccgttagtataatttaactaactaaattattacaaataaggagggttgccggatgatagttacagaaaaagcaccagcaaaattgaatttgagtttagatacgccgatgcgatattttgatggttctcctcaatgggatatggtaatggtctcggcagacctggctgattatgtaactgttgagacacaccggcgccctgcaacaattaaagtctatacaaatagtggctttttacccaatgaccaacgtaatttagcataccaagcagctcatattttacgtagtcgttttcattgtaaagatggcgttacaattcggattaagaagcaaattccagtcgcggccggattgggcggtggctcttcagatgcagcggcagttttacgcgcattaaatagtatttggcggttgggcttgagtttatcagaactagcaaagatcgcattaacaattgattctgacgtcccgtattgtatatataacaaattagcccacgttactggccatggtgaaaaaatcgaattgttaccaccgcaacctcattattgggctgtaattgcaaaacagaagatcagtgtttctacgccgcaaatcttacgacaaattaattatgagaagcttcaacatcttaataatgaagcattactgacaaatttaaagaaagaagattggcaagaagcaacaaaatatatgggaaatgttttagagcccttaacgatgaaattttatccagagattggtcgtctaaagaataagatgaaagaattgggggccgatgttgcccagatgagtgggacgggaccaaccgtcttcgcaatctgccatacagaatcgcgagcaaaacggattcaaaatagtatccggggattttgtcgcgacgttcatgttgtaactttgctttgattatatttaaggacaagaggaatgaggctgagagaaaacttttgttttctcccagcctcaactgcttttatgaacaatagtaagataacgtgaaactagcttcatgtcgccacaagactcgaggctaagtacgaacgctaatcagcccgtgccgtgctaatcatcgttctagcttagcccaccgccttgtcgaggaggttattttccactctcctcttgtcctttttatttttatagttgcaatctagcataaagttcgatattatattcattgttctaaatagtaatgattacgattaaagaagagggaaagaatgaaaaaatatattatcagtattagtagtattgttgctttgttggttataattcttgggttatcctttgttccgtggaaatcgatggggaaaaatcaaaagccaattagagtggtaactgggatgaatttctatggtgaagtagcgcagaaagtagctggcgatcatggccaagtgatttcgtttattgataatgcttcggttgatcctcatgattatcaacccaatactaagcaagcccagcaagttgctaaagccaatgtagtaattgaaaatggtcttggttacgatagctgggtaaacaaactcgttaaatcaagcagtaaccataacaagattaaagtaattaatgtagcatctttaaccggcaagaaagatggcgacaatgagcatatttggtatgcacctgagacggtcgaaaagttagcaaatgatcttgcaactcaatatggtaaaattgatccgcaacatgctaaggattaccaaagaaatgcacgcaaatatttagcttctcttcaaccgcttaatgaagaaattgcgaaagtaaagcgccaggtaaatcctaataataatcgagttgcagtcagtgaaccagtttttgattatgccttagagaatgttggttatcaaattatggacaagcattttgaaaaagcagttgaagatgggaatgatccatcaccaaaagatattgaagaaattcaacaagcaatcattaatcaccaaattgccttctttgttgataattcgcagacaagtgataaagttgttgataatttagttaaacttgcccatgaacataatgttccagtattaaaggtaacggaaacaaagccgaatgggtatgactatatgcagtggatgctcaagcaataccaagcattgtctcgcattcaacaaaaggagaattaagaagataatggcagttgtatcagttgatgatttaacgatcgcttatggaaatcatactgtaatcgatcatttaagcttctccattaatgaaggggattttcttgtcgtggttggtgaaaatggggtcggaaaaacgactcttgttcgctcaatgcttggttttttaaaaccgaaaagcgggacaataactattccgcaaagtacacgacttggctacgttcctcagtttcgtaatattgacgaggaatacccgctatctattcgcgattttgttgctttaaatactaaaccacgccttttgccatggctgactaaaagcgagcgaaaccgtgttgaacggatgattcgtgaaaataacctaacaaagattgctgagcggccccttggtttagcatcagggggtgagaagcaacgagcatatcttgctcaagctttattacccaatccaaatctccttattctggacgaatcgacggcaagtctggacaatgaaatgaagtatgaattgctagacctggtaactcgttttcaacaaaatggtttgagtgtaatgtttattactcatgattgggatctagcaaaacaatatggaactcgtttcttgtatttatctcccggttcttattccactgggccaattaatgagttacccagtccggtaaagggggataaaaaataatgttaactttaagttttatgcgtcatgcatttgtcgctagtacatttattgcgattatttgtggaattattggagtttttgtcgttgcacgaaatttatcattcttaacgcataccttgtctgaaattgggtttgctggtggtgcttttgccgtttttgctggatggccagcactaaatgggatgattctgtttacaatgttaagttcagttattgttggacaaatgagtataaaagaatcacgacgagaagcggttattagtgccgtttcagcgctgttcattggcttaggaattcttttcttatctttgagcagtcagtcagctagctcagcaacaagtattttgtttggtagcgtggttggaattagtttgaatgaggtctggcagcttgtctacctttccattcttgttttaatcattttgctattgatgtatcgtcgccttaagtttgattcctttgattcaattggggcacaggtcagtggaataaatcaaacagtgatttctgttatttttcttttactacttgctttaagcgttagtgtcgctgctcagattgtcggttctttgctaatttttattctcctaacgttaccagctgctagtgctaaatactttacgcatggtgtcgcacggatgattattttagcgattttattttcactgttaggaacatggcttggtctttttctcggttatttgacagattggccggttagtttctttatcgcagtgattgaagttatcatctataccacagccttgatttatagtaaatttatcgaatcgaattagactgtggcttaagtagttaagcaggtaaacaacatagtacaacaatggtcttcaacgcccggcaaagtgttggagactattattatttgcggggctttcagatgctagcttcgtggtgacaaaacgcccccctatctcggactctttttcttcagtaaatactaaaatttttgccgaaaatccgaacattttatgttaaaatcaatgttaattaatcctttttgaaaggcagagaaagaacatgaaaattagacggagtaaccgattggtggatatgacacgttacttgcttgaacatccgcgatcattagtatcgttgaaattttttggtgagcgatatgactcagctaagtcatcaatcagtgaagatttaggaattgttaaacataccttccaaacgtggggacagggacgattagaaacaattcctggtgcaagcggtggcgcgatattaacgccattttattctaaggaaaatgctcaggcggccattgataacttggttgaccgggttaatgatgactcgcgtttgctaccgggaggttatgtttacttatcagatttaatcggccaaccggaagtcttgcggcagattggtaagttaatcgctactcaatacgttgatactgatgttgatgttattatgacagttgagactaaaggaattccgattgctcaaagcgttgcgatgtatatgaataaaccatttgttattgttcgtaatagttcacacattactgaaggacctactgtaagtgttaattatgtttctgggtccgtccaacggataaagaagatggaattgtcccgtcgtacattatcagctggggcgaatgtcttggttgttgacgactttatgaagggcggcggcacgattaacggaatgaaatctttgattaaagaatttgatgctaacttggttgggattactgtttttgcagaaggtcgtccggtaaatgggcaacggttagtcgataactgtacttcattaatcaaagtggaaactaaagatggtacggagaagaagattgcagcacaagcaggaagcttcatggaaaacgtgtttgataagaaagtagagaattaggaaatgacaaaacgtaatgcaattattttagctgctggtaaaggtacacggatgcgctcaaagctatacaaagttttacaccaagtttgtggtaagacaatggttgagcatgttttaactcaattggaaaaagccaaaatcgataatattattacaattgttggttttggggcggaaacagttaaacaacgattaggacaccgtactaaatatgcgctgcaggaacaacaactcggaactggtcatgccgtaatgcaaacaaaaaaccttcttgcaaatgaagatggtgaaactattattgtcagtggtgatactcctttatttacggctgagacttttgaaaagctttttgaatatcatgaacaacggcatgcggcggctactattttgacttctattgctcctgatccaactggttatggtcgaattgttcgaaatgatgttggaatcgttgaacgaattgtggaacaaaaagatgccactattcaagagcaggcaattaaggaaattaatactggagtttactgctttgataacaaaaaactatttgctgcccttagtaagatcacgaatgataatgctcagggtgagtattatttaactgatgttattggtattttaaagcaagaaaatgagatcgtaacagcctacaagatggataactttgacgaatcgatgggggtaaatgaccgagttgcccttgcacgtgccaacaaggtaatgcgtaaccggattaatactcattggatgcgtgaaggggtttcgatgattgatcctgatacaacttatattgatgctgatgttaagattggtcgtgatacagttattgaaggtggcgttgtgatcaaggggcatacagaaattggtaacgattgttatatcggtgctggttcacggatcattgattccaagattcacgatggggttaaaattatttcttctacccttcaagaagcagaaatgcacaatggcagtgatatcggtcctaatagtcacctgcgtccagaagcagaaattggcgaaaacgttcatattggtaacttctgtgaggttaagaaggcttacattggtgaaggaacaaaggtcggtcatttgacttatatcggtaatgctactttaggtaagaatattaatgttggctgtggagttgtctttgttaactacgatgggacaaataagcaccataccaatgttggggaccatgcctttatcggtagtaacagtaacctagtggctccggttaatattgccaaggattcatttgtcgctgctggttcgaccattacagacagtacagaacaatatgatatggcaattgcgcgggcacggcaggttaataaagaaaattatgctaagaagctaccatggtaacttgctttttgcctcactaatttatattatgtaagtggtagtagtataacttttattaatcagcggaggacctaatgacacagcaatattttgatcaaaatttaaaaatctttgcgttaaattcaaaccgtcccttagcagaaaagattgctaagcatgtcggtgttgatttaggaaaattatctgttaatcgttttagtgatggtgagatccaaattaatattgaggaaagtgtgcgaggagacaatgtttatgtcatccaatcgacctctgccccagttaatgacaacttaatggagttgttaattatggtagatgcacttcgtcgtgctagtgccaagacgattaacgtggtgatgccatactatggttatgcccgtcaagaccgaaaagcacggagccgtgaaccaatcactgctaagttggttgctaatatgttgcaaaattccggtgttgatcggattattgcacttgatcttcatgccgcacaaattcaagggttctttgatatccctgtcgatcatttgatgggtgctcctcttttagcagagtattttatcaaccagggtgttgctgaaaatgcagttgttatttctcctgatcatggtggagtaacacgggcacgagcacttgccgagtttttaaaatctccaattgcgattattgacaagcggcgtccacgggcgaacgttgctcaaatcatgaatattattggcgacgttaagggtaagaagtgtattatgattgatgacatgattgatactgcgggaactattagtttaggttcgcaagcattaatagatgccggcgcagaagaagtctacgcatcatgtacccatgcggtattatctggcccagcaattgaacgtttacggaatgcaccacttaaagaagtcgttgtgacggactcgattcaattgccaaaagaaaaacaaatcgataaaatcaagcaggtatcggttgctccactaattggggatgcaatcaaacggattaacgaaaatcgtccggttagtccactatttaagcaagtattccaaagtgcacagttggaaaagaagtaaggcttaagtaaattgagattagtaaataagtagggactgtgacataagtcaagttactttcataaaagacaaatggcacagtacaccaatggcttccaacgcccggtaaaaccgaacgttggaggcctattgttgcttgcggggctcgaaaacgaagtcacaagtgacttctgtctcgcttcctttcttatattccatttctgtatttaaaagaaaataaagatttgggaaagacaaacagtcattatcaattcatgttataatacgatgtgaaataaggaggagaaaaatgacaacaattaagtttttcaaaaaagcaatggttggaacagctgcagtcgctactatctttgccttagctggttgtggtaaacaatctgcgtcaagtagtgatacaagttcttccagcacatcgtcgtctgtccgttcttccgaaagtaaagcttcaaaggcttatcgtacagctaataagcttatccaaaatcatgattatgaaggggcttatgaacagttaaaccaattaaatgatcataatgctcaaacggaagcacttgctgatgatttacaaagctacatggatgcccaaaaagcatatgaaaatggcgattatgatggtgctaagaacaaattgaaatcacaaaagtcaactagtccggcaatgcggaatgcatacgctgatttacaaagcaaggtaagttctgcacagggttctactagttctcaaacttcatcatctactaataatagcaagcaaacaaataagcaatccggttctacaagtgcagcaactcaacaatcatcctctgctgctaaccaagctgcatctgatgcaactagcgataatgtagtacaacaatttgctaacaagatgggcttcagtggctcccaaggttaccaaattatgccaactggtaagactggtaatgtttacaagtttgaagtacgtcaaaacaatagtgataacactgttgctaacttaatcggtatttaccaatacaatagtcaaactggagcggtaacaaaaatcgcttaatatataaaagatgacaaaaataaaagcaagaggtgtagaaagtacgcttcttgctttttatttctgtctttacttaagaacatatttttcaatcgcttttccaacaccatcatgattattatcagcggttgttacgtcagcgatctttaaggtaccaggaattgagtttcccatcgctacccctaacccagcaaattcgatcattgaatcatcgttttgtgcgttgccaagggccattacttcttcttttttaattccgagttcttcgctaagtaattgaagggtatttcctttacttgcttgtttattcatgaattctagataaaagtcttcgctgcgaacaatggaaaagcggtcacgcatttctgccgaaagctctgcccaggctttgtcaatttgttctttagtatcaaccatcattgctttggcgattacgtattgatcttgcattttagaaagttcttcaaaggtacgataacgaattggcatacttacaaggtctgactcgtagactgtataaggactcaaatcccggttaattgtgtagatgtaatctcgcgtttcgatttgggacttgacgccttctttaatacaataagtttgccagtctgcatagtcattgaaaggcatcgtgtaatttaccaggacgttcccactagttgattgggccagtgcaccgttgaagctaataacaaattcgttatctgaatcatttaagcccaattggtcaaggtatgcttttacgcctgtcattggacgtccagtgcataagacaatctttactccctgcgcgctggctttttttattgcagcaacagtttgtggtgtgatttcacgttggtcattgattaatgttccatcgatatcgattgcgactaatttaattgccattatttttgctcctttgggttaataatatgattattcttgatatagctttgaaattcttcatagattggttcgaaaatttcaatattgtttcgcgtttcaagcatctcttttgggaaaaagaaccgttgatctccggcttctcgtcccgatacgctagcgactaaggtactaacttgggatagttccacaaaatcgccattaggttggagaagctcgatttgcgtttgagtattagaatcttgtggatgataagtatcatatggaagtttaaaactatcgttgactgcggtgtaatactggctattaaacccagcagtttggatgagctttcgtaaagttggtaaaagtttttgtgtattttgatcataaatgactgatttaaatggtcggcggttaagaaaacgactagcaaggtcgcttaaaatatcatcacgagaatgggtccaatgaataaaataggtggttaagacaccatcgtcaagcgccaaatagtcatccaaggtaaacttaccattaaaaaacggcatcagcatatgaggggtgaagtcgggctcaaagtcattaggatgttggtaaatatattttgcccgcattaagaggtggtctaagataacttccattgaacgggaaactgggtgaaagtagacttgcagatacatttgaaggcgactgataatgtaatcttctaccgcatgcattcccgaaatttcaaaggcaattcctctcttaactggtcgcataacatgaagaacacgatcaagatcaaactttccgtagtttgttcctgtgtaatacgcgtctcgttgcaagtaatccatccggtccgcatcaacttggcttgagatcatttgcaccacttgtggattttcataagtatggtcgatcacactagcaacttgatgaggaaaatcaggggatacccgttgtaatattttattaatattagtgctgctgtcggtgatcaactggcgggtaatttgctcatggtttgtatggaaaatatgctcaaatgtatgggaataaggaccatgccctaaatcatggaggagggctgcacataaggcaactggtcgttcgtgatcatcccataggccgtcgccaggatgctgactaggatagtttcgctggaaatagttgcacatttggcgggtaatttcatagacgcctaagcaatggccaaagcgggaatgctcggctccatgaaaagtaaatgatgaagttcctagctgcttgattcgtcgtaatcgttgaaactcaggagtattaattaggtccataataatttgattatcgacaataatttgtccgtgaattggatcgcgaaaaaccttttcacggcgaagtttttcgtcataaaagtgattcatattaatcttctttctctaaacgttcttgtaaacgttccatgctgattagttctttattgagggttgatataaaattaggcgaccacattaagttattaaggctgtcaggaacaatgatttgaacgactgattggattcgctggatcgcatcctgaacgcttaattgcgtgttgagggctttagagatagttgtcatcgctcccggccaaacatctggaaaatgccacttattttggctttgctgcaatcctgtatcatagaagtcacgaattagtttgccccgatcctgctgattgccaccgacacttaagtaaagcattactgtaactcccattttgtttcggcgttgggaaatgccaccgattttttggccgttaacgctgatatcaaaactccccggacagtatgaatgagtgatttcaccagtagcgatttttaggctaggaaaagcagcctgaattaggtcgaccattcgttgatatgcttcatcaatagttaattcatggtcttcgaggtgccatggatagaaaattgacaggtttaaaataccgtcgtcacttacaactgctaatccccctgaattacgcatgaaataatgaaaaccacggtgcgtaagcgaagtaagggcagttgataaatgcggtaatcgttgatcttttaaccctaaaataaccgtatcttctaaggtccaaaaatgaagaagaggatatttgagtttgttagctgaacgtaacaaagcgttggtatagatgaaagacgaaagattatccgctggagttaaaggttgaataaaccgctgaaaacactgattcttaaaattagccatcgtacttcttcttttctatgaaataatatatctatattatacaagaacttacgagaacatggatatttcacggggtatttatccataaatttgcgagaatacccccacttctataagtaggggatgaatcgctctcttaaagcacgttagtgctttttcttttgttctatgatatatttagtatatatctataaaatgtggtgataacaatagaattggatagaaatcagcattcagtatacttacttaattaccatttggtaatggtggttaagtatcgtcgaaaagtaattaacgatgaaatatctgaatatcttaaacatcgttttgtagttgtgggacaagcatacggcattaatttgcaagaatggaattatgatcaggaccacgtacatgttttgtttagagcaacgcctcatacggaaatggctaaatttttaaatgcttacaaatcgtctagctccagaatgatcaaaaaacaatttccagaaattaagcaatatctttggaaatcagccttttggacacaaagctattgcttaattagcactggtggagcgcctttagaagttgtaaaacgatatattgaaagtcaagggagaaaataatggttctaaaagccgttaaaatgcgcatctatccaaattcagcacaacgaaatcagctctggcaaaccttcggttgtgttcgttttgtatggaatcaaatgcttaatatgcaaattgaacggcgcaagaataatccggaagctaaatttgtgaatgcctttgggatgaataatctgttgaaacaacttaaggttgagtatccttggttgaaacaagcagaatcaactgctttgcaaagtgctaatcgcaatttagccgatgcttttcaacgcttttttaaaggtcaaaataagttccctcgatttaaatccagaaaatattctcagagctacaattcaaagtacgttaatggcaatattaaagttttagattgccatcatataaagttaccaaaactcggtatcgtctattttagagctggtcgattgccaatgggtaaaattaagaatgtcactgttcgtctgaacgttgctggtcaatattacattactgttttagtggaaagcgaaaaccaaactcttcctaaaacaagtaaatatattggtggcgatttaggacttaagtcattacttaatctttcagatggatgcaaggaaccgatcaatcattttgaagacaaataccataaaaagttgtatcgttgggagaaattgcgtagtcgtcggttcttaaaggctcagcaggaaatcgcctgggatcatcataataaagtgttagttccacggcaattagatgattttaagaattatcagaaagctcgtattatggtggcgaagtatcgacaaaagattgccaaccaacggttggatcagctacaaaaattcactactaaattggtcaaaaagtacgacatcattgtgttggaaaaacttaatactaagggaatgatgaagaatcaccatttagctagagcaatcgctaacgctagctggtcaaaattagtagatatgttgcaatataagtgtggctggtacggtaaaaagcttattcaggtcaatccgtcatatactagccaaatttgtgctaattgtgggaagaataatcatcggttaggattgaataaatcggaatggttagcggtacgtgagtgggattgtccaaactgtggtaaacatttagatcgtgatattaacgctgcacaagtcatcttgcaaaaaggattagctatccgatagataaagttaggctcgggacgagccttggctaatagtcgtaacctctgcttgaaggttcgttcagaatcggtagggtaagtatgcgatgtttccagaatctcccacttcaagcattaaaccgtaggtttagctaagtgggagtagttcaatggtaaaaagagtataataatgacgatgagcaaagtgaaaggaggagtttattatcaaaagtgtaattcctgttcatgtaaatctctcaacgatcattgatcaaaatggacagcaagaaaaatttacctttactgaagaaggtacttttgttgaaatgaatggtaagtattatttacggtacattgaacaccaagatggtcaagaaacgccggtccaaattaaatttgaagatgagctaatccgcttaagaaggcgtggaaatgtcgaaacaaacctatttttagacccaacacaagaaaccatcatgcggtaccaaacagaatacggcatgattaaaattgacgtgttaacagaaagtttggaaaaagacgttgatgtaaaggctccggctggtcacctttctgttaagtaccaactaaaacaagcgggacaattaataggtagttaccaactagaattgcaatttgctgcttaatattgtatgatgtagtttagactttttgaagggatgtgcaccaatttggatttaaaggtttttgacggtcaggacaaatcagaactttcaatgattgaagtcgcacacgctattttagctcaccatggggaagcaatggcgtttgttgatttaaccaacgaggttcagcaatatctgggtaagagcgatgaggaaattcgtgaacgtcttgcacagttctatactgacttaaatgttgatggcagttttatttcccttggtgacaacacctggggtctgcgtgcttggtacccattcgaatctatcgatgaagccacagttggtgaaaacgaagaagatgaagaggatgatcgtccaaagaagaagcggcgtaaagtcaatgccttcctcgcagacaccgatgacgatgatgatgtaattgactatgacaatgatgatcctgaagatgaggatcttgatactgacgatgacactgattctgaagatgattatgatgacgacactgatgacttcagtgacgacgatgatgatcttgacgacggtattgaaggtcagctatcagaattacatgatgaagaagatgaagacgaggatgacgaatgattttcaactttgtgcttgactattatttattgaccctgtattatttttcttgggcgcctgtaaaaacaggccaataagttcgtagataaataagctccctgtttcagtgttttatttgaaatagggagttttttctattatcacacccgcaaatataaaaaaggagtagacgacaatgacgaaatacatttttgtaaccggtggagttgtatcatcattaggaaagggaatcgttgctgcctctttaggacggttattaaaaaatcggggcctgaagattgcaatccaaaaattcgatccttacatcaatgttgatcccggtacgatgagtccataccaacacggtgaagtttttgtgactgatgacggaacagaaactgatttggaccttggtcactatgaacgttttatcgataatgatcttaataaatattcaaatgttacaacgggtaaaatctactctgaagttcttcgtaaggaacgccgtggggattaccttggtgggacagtacaagttattccacacatcactaatgccattaaggacaagattaagcgtgctggtgaaagtactgatgctgaagttgtaattaccgaaattggtggtacagttggggacattgaatcacaaccattcatggaagctattcgccaaatgaaagaagaagtgggtagtgaaaatgtattgtacatccatactaccttagtaccatatcttcgtgctgctggtgaaatgaagactaagccaactcaacacagtgttcgcgaattacgtggtttaggaatccaacctaacattttagtcgttcggacagagcaaccaattactgatgatatgcggaagaagatcgccttattctgtgatgttgatcctaaagccgttgttgaatcgatggatgttcataccctttatgaaattccgttaaacttacaaaagcaaggaatggatcaattggttgtcgaccactttggtttaaacgtgccagaagctgacatgacagaatggactgaaatggtaaatcatattgaacatgacttaactaagaccgttaagattgcgatggttggtaagtatactgacttacaggatgcttatatttcagttaatgaatcattacgtcatgctggttatcctgtcaatgctaaggtaaagattgaccactttaatgctgaaaacattactccagaaaatgttgaagagacattgaaagactacgatgggattcttgttcctggtggttttggaaatcggggagtagaaggaatgatcactgcaattaagtatgctcgggaaaatgatgttccttatctcggcatttgcttagggatgcaaacagcatgtattgaatttgcacgcgatgtattaggctacactgatgcaaactcaactgaatttgatacaaacactaaacacaatattattgacttgatggcagatcaagcggacattgaaaatatgggaggaacacaacggcttggtgcatatccatgtaagcttaagccaggaacagttgcggcagcggcttatggtaaccaatcaatgatcagtgaacggcaccgtcaccgttatgaattcaacaacgactaccgtcaagaaatggaaaaccatggtttagttatttctggagtaaacccagatcggaatttagttgaagtagttgaaattcctgataaaaaattcttcgtggctgctcaatatcacccagaattcaagtcgcgtcctaatcatccagaaggattatttgctgcatttgtaaaagcagctgctgaggacaaataaaaattaagttgtataatatatttaatacaagagatgggggcaagaatgtcgcttctcttgttttttgtttagtagaattgttaaattttaagttaaatatgctaatttttggcctgaccttatgattttttttaagattgtttataaaaggttgtaattctcttgatatttcattatcattacagttgactgttttgtaactgaaataatcattaacttagcttaaatgaaaaacagactaaaatttttaagtgaggaaacgcagaaatgaagaaaatgatcattcaaggaggaaaccgtctttctggcgaagttacgatcggtggtgccaaaaatagtacagtggcattaattccagctgctattcttgcggatacccctgtagagtttgacacggttccagatatcttggatgttcacaatctgatgattattttggagtcaatgaatgtaaagtccgagtttagtcacggagttttagatattgatccaacacaaatcgtagaagctgaacttccaagcaaggcaattaaaagtcttcgggcttcctattactttatgggtgcattattaggtcgtttccatcgcgcgacattaacatttccgggaggcgataatatcggcccccgcccaattgaccaacacttaaaagcatttaaagcacttggagcaaccgttagcgaagaaaagggtactgttcatttagatgcgccgaatggcttacatgggtctcggatctttttagatatggtatcagttggtgcaacgattaatgctaccttagcagctgttcgcgctgaaggaacaacgattattgaaaatgcagctcgtgagccggaaattattgatttggcaacattcttaaataatatgggcgccaaaattcggggtgctggaaccgatactatccgtatcactggagtaaagacacttcagtcaatgaatactcatacaattattgctgatcgaattgaagcaggaacatacctatccttggcagcagcgcttggtgatggggttatgatccataatgttattcctgaacacttagaatcatttaccagtaaaatgattgaaatgggtgttgaacttcaaatcgatagcgataagatttatgtaccaaaatccagtcatttacatccggttactgttaagacaatgccattccctggttttgctactgatttacaacaaccgcttaccccattgatgtctcttgctgatggtgatagtacgattgttgataccatttatcccaagcgtgtaaagcacatttcccaactacaaaaaatggggatgaagattgaagcacatgatgggatgattatcgttaaacatacagaaaagcttcatggcgcagaagtctctgcaggtgagattcgtgccggagcagctttaaccattgctggattaatggcagatggacagactgtaattaataatgccggaaatattttacggggttacgatcgaattgtatggaagcttaatcgccttcatgccaatgtttctattgaggacgattcttcagtaaaaattggttagaagttgcgtacttctttaaatcgtggtatcctgttagagttgattatctatgtttcaggcaatgattcatggcaaaaggagcgtaataaattatgaaacaaggaattcatccagattatcatccagtagtttttgaagattcatctactggttacaagtttctctctggctcaacagccacttcaagtgaaactgttaagtgggaagacggtaacgaatacccattaattcgggttgaagttacttcagattcacacccattctacactggtaagcaaaagtttactcaagccgacggtgctgtcgacaagttcaacaagaagtacggtctcaagtaatcgaacttcttataattcaaaaaagccgggaaaagcgaaagtttttcccggctttttttgaattaagtctaataaatcattattaacgttattttgcgtctttaagtattgatctttctctgcgtataatattgataattgagaaagtgggggctacctatgcatgaaaaaataattaatcgaataattgctctgcatcgttattcttttgttagaataactcggcagacattaattatgatttttcccattgtttttattggaacgatggcaaagatgattttgaaaactgtttttaaaccagatggatttatttataatattgcttttcttgatgtaataccacagaacgtgttgcggattattcaatttatgttaactagcattagtcaattaaccttagggattctaggaatttatactgtttatatggcagcaaaatttacggcgaaaaggtatcggcgagacggtaaatttgccggaataaccgctattttgacccttttactaatgtcttatcgttatggcaagtcgtccccgcaattttcccttagcttttatcaacggctcctcagtggcaatagtttgttaatcgttttaattcttggttacggaatcggccagctttaccggtggttaaccccgcccaaagatggtgataataccaatgcgttgccgttattacaggaacgatcatttagttcaatgctgccaatgacaattagtcttatttttggagtgacggttgctcttttcttaaattccaacacaatctatcatgcttggtcaacaagttactccacgttagttacgactgcccaagagcatcggcaattatggctgacgttattagctacaatggggctaacaatatttgattggttaggattaggtgttccatacacttcgatggcgttaacctctggagattcatttactgctaacttgaactatgcgctcgctcatggaactccgtggaatgtaccgtatgagtttttaggcagttctctttataattcatttgctaactttgggggcgatggattgatccttgccttgatagttgccattctgttaacttctaatggctcctatatgcattgtgttgcccagtggacggccttaccaacactatttaattttaattatgcggcaatgattggcttaccggttgtatttaatcccttatttctgatcccatttgtcttcttaccgattgtaaacattctccttgccagtttagcgattgcgattaacttaataccttcaacaccttacccggttttgcaggggacaccgggaccccttattagttttttggggacaaatggtaattggggaattttgatttttaccttggtattgcttttaatcgatagcgctgcctatatcccctttgtaaaactggccttagtcgttgaaaatcgcttaatattagcagaacaggacgtgatcagtcatgaaaaaaatgactaaatcaattctccacactcgtttagtattgattggcctaatattgatcttagtcctaatggcaattccagcatattattggatgaaagatacaaataaatatttagctgcccaacataattctagaatgtcgccgataattatggttcctggaagctcagcaacacaaaaccgctttaatccacttattcgtaaacttaacgaggatagccctaaaaaacatagtgtgttgcgcttagaagtaatgaacagcggtaaaattgtttcgcaaggatggataaatcgcggcgataacgagccgattatcgtgattggctttgagaataatcgcgatggctatcaaaatataaagaaacaagcgcaaatggttaataaagcctttgaacgattgacggaagagtataattttaataactttaaggcgtttggccattccaatgggggtctagtatggacttattggttggaacattactactctgaatataaagatgcgattacaattaaaaggctaatgatactgggaacgccatacaactttgcggagtcttctgttagccatccgacgcaaatgttttctgattttgtaaagtatcgaagtcgaattcctaaaaacttattagtttattcggtcgcagggacagaaacttatacatcggatggtctcgtcccagaaggaagcgtcgatgccggtaagtacatttatcaaaaacaagtggcccattatacgagtatgacggtcacgggaaaagatgctcaacactctaacttgccacaaaataaacagattgtacggttaattgaagagtatttgcttgatccaaatgacaacggtaatcctaattcgcaaaataagcagggggctactcaaaattaattaagcaggttatactaagttcataataaaaagtaaggagttcaatatcgtgaaaaaagataaaaagcgatcatttgaatggttatggtggacagcggttgttgtactgttattgatttcagttgtcttaatttttaaccaacagattaagtcttacttagtagggagttataaacctgagattactcggcaaacggttcaaagcaaccaaaagaaaaaagcgacctatgattttcaaagtgtcaaagatcttaacttgcaaacggctgccaaggctcgtgcaaataagcaatcgattaataccattggagcaattacggttccggctattaatatgacgattccaattgctaatgggattgataatacaacccttgcgttagcagcaggaacccttcgtccggacatgaagatgggggaaggtaactatgcgttagctggtcataatatggcccacgggagtaaaatcctattttccccattgtattatcatgctaaggtgggacagatgatttatatcaccaacatggatcgcgtttatgaatataagatttatcaacgtgaattcattgcggcgacccgggttgatgtggtagataatacaccggaaaagattattactttgatcacctgtgatgctaccgggaccaatcggttgatgatccgcggtaaatttgttaagtcagaaccatttacgcaagcaccacaaaatgtgcaaaagaattttagcgagaaatatacaacaggtcgttaaacaacctaagattagttcaggaagcgagacagaagtcacttgtgacttcgtttttcgacgcgaagcaagcctctgggagccctcgcaagcaacaataggcctccaatgttcggtttttaagccggacgttggaggccattgttgtactgcgtatttgctttttatgaaagtaacttaacttatatcaaagtccttttttgcttgcaaatttttagcaatatttgtaatccattccaaattaagaaaaacacaatgacgataaaaatagccaaattaaaataaattttaagtaaacagatgagcgaacggacaggaatgccaccgtttgctcatttttttgctgtaaataaatttcttgactcttttttaggaaccacctaagaaggagatacattgaatttaaggagatgcagtaatggaaaaacgcgaacaaatgaatgttttatggtttgatgaattgcatcgctcggacgttaatctcgttggtgggaagtcctcttcattaggggaaatgacttctgcaatgaaaattccagttccatatggatttgcgacgacaactcacgcttatcgtcaatttatggcggaaacgggattaaacgaccaaattaataaattattagccgaaattaatgactatgaaaatgctgacgaacttcatcgggtttgctcacatattcggcagatgattgtcgaagcaccgatgccaagtgagatcgctatgacaatcaaaaaagcttatgcagccttatcagaaaaaatgggtgaaactgaaccatttgtagcaattaggtcaagtgctaccgctgaagatttaccgaatgcttcttttgcggggcagcaagaatcgtatttgaacgtgcgtggagctgaaatggtattagcaaaggttcaagaatgttatgcttccttgtttaccgatcgggcaacctattaccggcataagcaacattttcctcatgaaaaagtggctttatctgcggccgttcagatgatggttttctcaaaagcttctggggttatgttttcagttaacgtggcgaacggaaatgatgcccaaattgttattgatacgatttggggattaggtgaatacattgttttaggaaaagtaacaccggatcattttgtgattaataaaaataaccttcaagtagtagaacgttcggtagttccgaaagcaattgaattgtgtcaaacccctggtggcggagtacatgaagaaccggtgccagcagaccgggcaatccggccagcgctaactgaaaaccaaattcatgaattagcaggatacgcaaaggaaattgaaaagcactatggttgttacatggacatggaatttgcgctagacgcccgcacagatcggttatggctagtacaagctcgtccagaaacggtttggtcgaataaaaataataagcaagcaacaaaggagtccactgtctcaatgaataaaactaaaaaaatcttggtcaaaggattaccagcaagtccaggcgtttccactggaaaggtacatgtaattgcggatcctaaagatattgatgaatttgaagaaggagaaatattagtaacgttgatgacttcgcctgattgggtaccggcaatgaaaaaagcagcagcaatcatcactgataatagtggaatgacctgccatgccgcaattgtttctcgtgaaatgcagattccgtgtatcgttggaaccaagagctgtgggcaggcagttactgaaatgctacaagatggtgaacaagtgaccattgatgctaaaaatggagtcgtttatcaaggtgatctcgcagaacaatttaatggcgaaaaagagacaacggaatgtcaccatgcagaatattacccgccgactgcaaccagggtcatgatgaatttaggcgatccagaactagcagaaaaatatgcagaactccctgttgatggcattggcttaatgcgagaagaatttctttggacgacttatattcatgaccatcccctctacttaattgaaactggtcatcccgaaaaagttgttgatatgttagcagatgggattgctaaagtggctcgggcgattgctccacggccgatggttttacgtttttctgattttaagtcgggagaataccgtaatttaacgggcggcgataaatatgagccccatgaacctgccgacttattgggatggcgcggcgcttctcggtactatgatcccaaatatatcgaagcttttaagctagaacttgcggcggtaaaaaaggtgcgtcgagaattccagttaaagaacctcaatgtaatgattccgtttgtccgcaccgttgccgaagctgataaagttacaaaattaatggcagctgccgggttacatcgtggtccagattttaaggtatacatgatggccgagatcccaagtaatatcatcttggcagatcagtttaataaatatgttgatggttattcgattgggtccaatgatttagcaatgcttattttaggttgtgatcggaataatgatacagtggcccacctctttgatgaacgtgatcttgcggtgaaacgtgcgattagccaccttattaaggctgctcaccaagataacaagacggtttcaatatgtgggcaagcaccatctgaatatcctgaattagcatctttcttaattcagcaagggattgattatatttcagttaatccagatatggttaaagaaaccaaacagaacgtggcaaggattgaacagcgcataatcctggataacgcgacgggtaagggacgacaagctgtggaaaattatgcatggtagaaaggattgaataaaatgcaaatttttgttgatattaatgcttctgaaaacggtaatggttcacaagagtttccgtttaagtacatccaacaagcggcagatatcgctcaaccgggggattatgttcaagtaatgccgggggaatatcatgaggaagtccatccacaatattccggcactagtgataagccgattatttatgtatctgctaagcaaaatcgggcaatcattacgggcgctgaccgtgttactggctggcaacatgttgctggtccggtatggcaattaaaactccctaatgccgaatttggtaactataatccatacaacgttttagttgatcaaacctttaatcatgccggtgaaatcttcctaaataataaagcaatgtatgaagttgatcagttagcaaaagttgaaacaccaagtgaaaacaaattttcccaagaccggaaatttacctgctatacctggtataccgaacagttgccagcagaagattcaaccgtaatctatgcaaactttcaagcgcaaaatcctaatgatgaatatgttgaactgactttccgtgagacgtgtttctatccagaaaaagcaggactcaatcaccttattctatcgggctttacaatgacgaaggctgcttgtcgatgggcatcttcgcaatataataaggggattattggtactaatcgtggtcagggatggaagattgccaagtgtgatatttctcacgctaagtgttctgggatctcccttggtcgaaatattgttccaaccattgacgatgataaggtttatccacaccggattaagaacaatacgattcatgattgcgggcagactggaattatcggtgttgaaggcaacccatcgccgattattgaacacaatagtatttacaacattaacgtccgccaaaaccttgtcagtgatgatgtcagtgcgatcaacctttcgccagcgattggggctaagattttacgcaactgcattcatgattgcacgcgcggaatttggcttggtggcaaggttgaagatacccaaatttcacggaatgtgttctacaacaattcactgccagattcatttgaagtcacaaacgaaaatcgggaggacttagtagcggcccttggtgaagatattgaaattaaggattcgatgggtgtgaccttgattgataacaatttcctattatcggattatgcgcttaagctcgaatctaagggcgtccttctcgttcataacctaattaatggcagtgtggaatggttaagcaatacgaatgttgctgaaaatgatccttactaccaccgcctttatcaacaaaatgcgccagaaagtgctccttacgattcttcttgtttctataacaatgtctttatccggaagaacctccggagtgaaatggcaaaattaattgcatttgcccacaaacaggcaagtgaacaaccaatcgataatcatattagcgatgataatgctgcttatgttggcctagccagtggacaacgaagctatattccagctaataaagcaggaaatatctttatgaatgatgagcaagaagacgttaaggtcgccatcgattcaagtgaagatggggtatttcttaatagtaatatttgcgactacttgaatgaagatactagtcgggtgatcgcggttggtgttactcccgagactgcccgtgattttgatacagatttcttagggaaacatcgtgaaggaattagtgtaaccgctggaccttttgatacgaaagaagaatatagtcaacgcttatttagactactgttttaaggaggtaaaggaatgcgcaaaccgtttattattgcgaactggaaaatgaataaaaatgttcatgaatccgttgcgtttgttaaagcaattaaagaaaaactcccggcaaataaagaaattgggatcgcggcacaagcagtctcgctctataacatgaaaaaagtggcgggatcttccaacttacaaattattgctcaaaatgcatctgctgagttagagggaccgtatactggagaaattagcatgcgaagtttagcagatgcgggcgtaacatacgtgatgctagggcatttagagcgccggcgcctttttaacgagaataatgaatcaattaatcaaaaagttttagcagccctcaatgctggtattattccaatcatttgtacggatgaagagatggtccaaacagaagttaacggacaaattcattatgtatttcgccaactaaaaagcgtccttaaaggggtaccagctaataaactatcacagattgttatttcgtatgaaccaagttgggccgttgggagcacgcatcaagcaaatccagacattgcggaagagggatgtcaggcaattcgtcaaagtctagttgaaatgtatggtaatgagattggcgagcaagtccgaatactctatggtggcagtgttaatcccgagaatattggtcaaattatgagtaaaccaaatgttgatggggcgctaatcggtcgcgcaagtctcgagattgaaagcttcttacaaatgattaattatatcgaattagcgagcaagcagaagttacaggtaatttaggaggaagaatgatggcttactttgataacggaaacaaactttttgatgatgcacggaagaatcaatacgcaattggggcatataatattaataatcttgaatggacccgggcaattttgcgggcggcagcggagactaatactccagtgctgatccaagtttcaatgggagctgccaaatatatgggtggttataaatttgtcaaagatatggttgaagaccagatggatgcaatggaaattaaagttccagttatcctgaatcttgatcatggtgactatgatgcagcgattgaatgcattaacttagggtattcgtcagtcatgtttgatggccataagttgccgattgaagaaaattacgccaaaaccaaagagattgtccaattagcgcattcacgcggcattgcggttgaagccgaaatcggtaaagtgggagaaaatcaggataccagcagtggagaacttgctgatgttgaagatgcaatggcgtttgcagcaatgggggttgaccgtcttgcttgtgggattggtaacattcacggcatttaccctgctaactggccagggttagactttgaccgccttcaagaaattgcgaatgcgattgatattccgctagtgcttcacggtggttcaggaattcctagagaacaggttcaaaaagcaatttcaatggggattgcaaaggtgaatatcaatactgaattccagttagcgttccaagatgcaacccggaagtatattgaaaatgaattagacctcaataaagaacaaaaaggatatgatccgcggaaattattacttcccggaacagatgcaataactgctaaaatgaaagatatgattgaatggttaggcacgccagcagtcgcctaattataatggaggttatcgaatggcaatcacagtttactttgtccggcacggtgagacctacttcaaccggtttgctcgcctgcaaggatggtcagataccccgcttacagaaaaaggagagatggatgctaaaaagatcggccaagttttagcggacttaaggatcgattaccttttctccagtgatttaaaacgagcagttgatactgcacggcttttaattgcggatcacctaactgcgacggtgaaggaaccaatccaaaaaaagttcttccgcgaggtattttatgggtcttttgaaggtcatagtaatgaagaaggcgctatctgggcaagctatcttgaaggcaagcgatttaggcgtatcggtgaattagttgatgagtttggcgttgaaaaagcgcatgacttactgaaagccgccgatccggctcaccttgcagaagatagtaatgaattaaatgcccgtgtagagcaggcaattgcctttttgcaaagcttaccggatgagagtaatgtggttgtagtagcccatggatcgattatccaatatattgcggggatgtatgggaaacctggatacaagtatgaaaacttacataacggcgcgctgatgaaggttcagctaacagctagagacgttgaaattactggatacaatcaatttaaactataaaaagaggcaaggaattattttccaaacctcttttgttgttaggacaattctttagtaattttatccagccataatggcaatgtctcgtttaggctattgtaagtatcttcaaagcggtgagtataccaaggatcaggaatttcttgatcttctttgccaggaattacttcatatgctaagtggactttatcacgatcttgcgctggtgcaatgcgttgtaagttgtacttgttcatattatccatgcagatgatgtaatcagcccactcgaagtcttgtcgtgtaattggacgtgagattaagccatccgttgataacccgtgtgcgtgcattgtctttgcggcacctgggtggggaccatttccttcttcttcgttacttgttccagcagaatcaacattgattttgccatttaatcctgcgtcatcaaccatttgcttgaacattgcctcggccattggtgaccgacaaatgtttcctaagcagacaaataaaacgttcatgtaatcacctcgtttatacttctatcataccgaaaaagataatattttgctaaaatattcgggaatcctaacactatccttaagtttttggtaaaattaagaacaaatatttttagaggaggaacaaaaatgacccttattattgtaattgttgtcattgtcttgttgattgctatttatgcaggactttacaacagtttgattcaattgcggacacacgcacaagaatcctggagtcaaattgatgttcaattacaacgacgtaacgacttgatccctaacttaatttcaacagttaagggctatagcaagtatgaagcgggaaccttggaaaaggtgacaaagctgcggacggaattaaatagtattccagacagcgatcatgctaaaaaaatggaagtttccaatgaattaacgggaactttacggacattgtttgccgtcgctgaaaattatccagacttaaaagcaagtgctgaataccaaaaattaatggaagaattaaccaatactgaaaacaagattgcctactcacggcagctttacaacagtactgtggcggctttagatgctaagattcaatctttcccaagcaatattgtggctaaaattcatcacttccaacaaatggattacttacaagtgccagaagaagtcaaggctgtgccaaaagtttcatttgatgatttaggtgattaagcatgttatatcagcaaattgcccgtaataaacgaaaaacaattttggtgatgtttgggttctttgtattgcttgctttaattggggccgcgattggctatttatttgcgcggacagcgattggcggcatgatcattgcggcgattattgcggtgatctatatgtccgtgatcattggtcaatcgactgatgtagtgatgcggatgaataacgcgacggaggtacgatcagcgagtgatgcgccagaactttggcatattgttgaagatatggctttagttgcacgggtaccaatgccgaaagtctatatcatccatgacccaagtcccaatgcttttgcgactggtaatgatcctgagcatgctgctgtggccgctactactggtttgatggaaaaaatgaatcgtgaggaactagaaggggtaatggcccatgaaatgactcacgttcgtaactatgacatccgtctgcaaacaattgcgttagccttagcatccgcaatcgcaatgcttgttaattttgctggaaatttctggtggattggtggtcggagcagtagtgatgaccgggataatccatcaagtattttcgccatccttggttcgattcttttgattatcttagcgccattggcagcaaccattgcgcagatggctctttcacgtaatcgggaatacttagccgatgcaggtgctgtggaattaacccgtaatccgcaagggatgattagtgcattggaaaagctaaaaactgctgttccaatgaaacatgtggacccaagcagttcggcattatatattagcgatccagaaaagaacgctaagcaccatcctttttcaaatctatttgacactcaccccccgctagataagcgaattgaacggttgcgtcaaatgtaataagtttatagcaaagactgagaaaaaacttttgctttttctcagtctttgctatttttactcacgacttattgtttttaatcgccttatactagtgagggtgatataattaaaaagctagaccaaagtatcaaaagaagaggtatctttttcatgaaaatgaaattagcggaaattgccaaggcgatcaacgcacaaaatgacattgaacaatggaaagacgtagaagtgactagtgtgtcatttgacagtcgacacttagatcaagggagcttatttgttccattgcaaggtgcccaagacggccaccaatacgtaccgagtgcttttaccaatggtgcagtagctagtttatgggctagtgaccatgagataacggatcagacgcacccgctattagtcgttagtgatccactagcggcccttcaacaactagggaagtactacttgcataagatcaatccgattgttgttgcagttacaggcagtaatgggaagacgacgactaaagatatgattgcgtcaatcttaagtacgcagtttaatgtcgcgaagacatatgctaattttaataatgagattggggttccagtaacgcttcttaacatggagtctaataccgaagcagtggtagttgagatgggcatggaccgttttggtcagcttgacttcttaagtaagcttgtaaatcctgacattgccgttattacaatgattggggaagcacatatcgaattcttcgggactcgtgataagattgctgatgcaaagatggaaattacccatggcctaaaggaagatggaacactagtatttaatggggatgaaccattattagaggaacgggtaaaagatcttgcccaacgacagatgcgctttggtcggcaactaagcaataatttgtatgcaacaagtgtccacgatgaaccacggcagttatcatttaccgtcaacgaatggccagatgaagaattcactatcccaatggttggtgaatacaatattaataatgcgttagcggctatggaagtgggtaagattctgcatattactcccgcccacatgaagcaagcgttggcaaacgttgaattaacggaaaatcgtgctgaatgggttaaaggaaagaatggtgaacagatcttaagtgatgtttacaattcaaacccgaccgctgccaaggaagtccttaagacgattgcagaaacaccagtagctggtcgccggatcgccgtattaggggacatgctggaattaggggatgctgcggcaaagttgcatgctagcttagcagaagagattgaccaccaaaagattgctagtgtttaccttgtaggcgaacaaatgaaaaatcttaaagacaagttgatccaagaaggatacccagctgaagatatctatcattatgctgctagtgaccttcaacaattaattgccgatcttacgactactttgacaggtgatgatattgtcctattgaaggcaagccatggcattcacctagaagaagtcttgacggcattaaaagcagaatagttaatatatttgccagtcgattactgatgcttatatcataaatcgactggtcatttttaggaggaaaatttttgaagtttagtgaattaggcttatccgatagcctattaaaagcaatcaaacggagcggatacgaagaagcaacaccaatccaagaacaaacgattccaatggttcttgaaggtaaggatgttattgggcaagcacaaacagggactggtaagacggctgcttttggattgccaattattgaaaacgttgatactgaaaatctcaatattcaagcaattatcatttcaccaacacgtgaattagcaatccagactcaagaagaactttatcgtcttggtaaagataaacatgttcgcgtgcaagtagtatatggtggggcagatattcggcgccaaattaagagcttgaaacaacacccacaaattctcgtggggacccctggacggttacgtgaccatattaaccgtcatacagttaaacttgaccacattaagacccttgtcctcgatgaagcagatgaaatgctaaacatgggattcttagaggatattgaatcaatcatcaaggaaacaccagatgatcggcaaacattgctcttctcagcaaccatgccaccagaaatcaagcggattggagttcaatttatgtctgatccggaaactgtgcggatcaaggccaaagaattgactactgacttagttgatcagtactatattcgcgcgcgtgactatgaaaagtttgacatcatgacccgtttaattgacgttcaagatcctgacttaacaattgtctttggtcggacaaagcggcgggtagatgaattgtcgaagggcttgattgcgcgtggctacaatgcagctggtattcatggtgaccttactcaagataagcgttctaagatcatgtggaagtttaagaacaatgaacttgatatcttagttgcaacagatgtggctgctcggggcttagacatttccggggttacgcatgtttataattatgatattccatctgacccagacagctatgttcaccggattggccgaacaggacgggccggacatcacggggtatccttaacctttgttaccccaaatgagatggattaccttcatgagattgaaaaattaacccgggtacggatgctgccacttaagccaccaacagctgaagaagcatttaagggtcaagttgcctcagcctttaatgatatcgatgaattaatcgcgcaggattcaactgatcgttatgaagaagccgctgaaaagctactagaaactcataatgcaactgatctggtagcagcattgttaaataacatgacgaaggaagcggccagtgaagttccagttaagattactcctgaacgtcctctcccacggcgtaacaagcggaataaccgtaatggcaaccgaaataattcgcatggtggcaaccactaccggcgtaagaatttccgccgtcaccaacatggtggtggtcaccgaaatgataaccatggaaagagccattccagtcgccatgcatttaatatccgtcatcgaaaagaagattaattagctaagaagtctttggttgagatttgaccaaggactttttttaatttggcagattgcaagaaataatttgaacaaagttagtgacgcagattacgcaaaaagatctcaatcggttgacctttggggataaagcgtcgtagtactcggttgcgattctcattactgccccgttcatgtggagaataagcatgcgcaaagtagaggggaatcctggcctgctcttcaattagcttgtagttagcgaattctttcccatggtcaacagtaagggtcttgagattatcttctaactggttagctaattctaaaatggccttggtcattgaggtactatctcgtccctgaagccgtttaacgatgataagacgactcttacgctcgacaaacgtagctattgcttgacctttacgctttccagataaaactgtatccgcttcaaagcgacctgaggtatgacggtcaataacttcagcaggacgatcttcaatggaacgtccatggctaaaagtcccacggggttctttggctcgtcggcggcgaattccatggtcaggtaaatcagccacgtcaatatccaatactccttgatcaatccagttgtagatggtcttgtaggcgattctaactacatgagccacttgttcaatcgaccatttttggatcttaatcttttcttcaattaatcgcttgaggttagtcgttaagatggttttacgcccacgatgactaagtttagcttcatgatcagcttgagctttaactgcgtgatattcaccagtcaaacgatgaacctcattaaagatcgtggttttaccgaagccaaggtaatcagcgatgtatttaagggagcggttttcataacgaagagtttcgatgacaacacggtcttcaaatgataaaatagtggtgcccataaaggtccttctttctaatggaatgttgtggtaacaccattaaagacctttatgggtttttatgtccactaatatgttcaacttaaattttgcaatctaccataaattaaatatgggtttgtgacttaagttaagttacttccataaaagacaaatggcgcagtacaacaatggcctccaacgcccggtaaaaccgaacgttggaggcctactgttgcttgcgggggctcgaaaacgaagtcacgagtgacttctgtctcgctcccatttcgttatcttttttataaaaatatttattctaattatttgatttatttataatatatttgttgcgactattacgatgattagtatctgagaagatgagctcatgtagatattaggctattatttcatcatgcaaattaagtgtaaaggggggctaatttttcttgtttggtacttgaggagctgcagagttatttatgccttgtgtgagagaggttttgacgatgcaaaaattagagcaattgattgataaaaactttgctgaaacagctcatggtaaggttgcaaactatattccgatattaggaattgttgatccgcaacaactgggcattgccatttatgacgttgacgaggacgaaattgggaccgctggaatggcaggaacgagatttgcgatcgagagtattgcgaaggtcataactttaatattaacgatcaagagattaggacataagcgcgtcttagcagaactagaaaatggttcggcagattatagcctaagttcggtactattggatgacgagttaaccgagcaggtccatcggataaattaccttaataattcctccgccttgttaacgacagccttaattgaccagttgatggggcagaatagttttaatgcccttctcgggttctgccgtgagatctgcaatgacccatgcattagcttgaatgagcgtttatttcggtcagtaattatgaatgataaagatattcatgcactggcttactatatgaaagataaggatattttagagactgttgatcaaacattgataacttattttatgcaaagctcaatgatggtgacatcacagagtcttgctaacttaggagcagtcttggcaaatgatggaattaaaccttgggataatgagcgtcttattagccatgaagataacgagttggtaaagaaattgctaacaacagttagctcgtttgaagaatcaaaagaatacacaattaaaattgaactccctattaaaagtggtactggcggcggcttattggcttgtgccccgcaaaaatgtggtattggtatttttttagtccagctcttgatcaacatggcaatagtttggcaggaatgagtttattacaagatgttgttgagcaattagtagtttaataaaagcgaggcccgaagaaaattcttcaagtctcgctttttgttaatgtaatttttcttggaatttctgtaaattaccaggagttggggttaagttagtccattctggtgaaaggaacttactattgatttggtaatgtggttgcggttgcttattagaaataaaactattagtagctttatcaacttttacccaaccagcccaaccgatatggatagtgtcttccataaatccaggcttatcaccatcatgagaaagatcaaaaatatgattgaacccttgttggcgaagctggaatttaatttttttaacagattggtaatacatattcatgtccatccccgtgtacttttcccactttgaattaaccggtgggatgataaagaggacatttgaattggtattcttaaactgattcaaaactacttccaaatcgccatattctggtgacttagtataattgaaatttcgttgtgatccctttgttttcgctaagtttttctttacacgctgggtatagaagctgtttttgataccgaaacggttgttatcagtatcacgtgcggcttcattcattgcatcatcataaagttcattataattgtaatgctgaggaagcttcttaacatttgggaggatatgcttgccatagttattatttaattgaaaacctgagaagatggcatcttcatgaacaagcatgttaagtcggaagcggataactcccatgtcgaaactgctcagggattttccttcagcgatttttttagcatacgaagaaacagtcccatctttgccaagcattgcaattaatcgcgttgcaatgtaacgatcatatggtgatttaggattagcgtgttgaagccagttaaggttagcgagttcaccattatagtacttgaaagctggtggttgaacaccctgcttggtaaaccattgtggtgaaatgatatagactgccttattatttctcatctgcgtttccattgaattaatgttaaagaattgcggaagagattgggtaccccgtgaaccaaagaggaaaggagtatagttatgataacgagcagccattacagaaggatggaagcgatccattcgccgtaattcactagaaccaaagaatggaacatagtgagtgtgcttatcactgagcgcttgttgcttaattgattggttcttaaaaacaacggggcttagtgatactgcagctttatgttcaatcgccgctgagtgctttttactaatcggcagtgaaaacaaaagaactactaatagacaagcgacaatcagcgggccaaagattgaccacagctttttgccattatgcattttggagctcctttacccgttcttcaatcttttcaatagtgtcccattggctacggtcaaattctgaaactggtacttgaacgccaaaagcatcttgtaaaccgagaagaagactaacagttgccattgagtctaaaagaccactttcaaaaaggttttgacttgcatcactaaagtctgcagtatcccgaccagttgcatcagctaaaatattaataatttgttcttgcataattaaaatcctcctaaaattatttgaatagataagtatctaagaacccactgaagatcaagaaagtaaacattacaaagttaaatgtgacaaaaatagcaactccagtagtgaacttattatgtggtagctgttttaagtttttgcgcttgaaacgcagccaccagtcattaactactaggcctagaccttggagaaaaccatagagaatatagtaccaggtaattccatgccaaaagcccattagtaacatattaagcatatatgcggttgatgacaaggcatttcgattcttaaaccatcgttttttggtagcaagaaagacgaaccgcataaaaatataatcacggaaccagaaagaaaggctaatgtgccaacgattccagaactctttaaggtttttcgatttgaaaggctgcttaaagttcatcggggtacgcacacccataaagtaactaatagcaactgcaaataatgaataaccggcaaagtcaaagaataagtaaagtccgtaagtgtacatgacaccgactaagttccaagaagggaatgatggatcagccaaggccgctttttcaaagaaggggtaaaaacgctgaccaaagaaataaccgatgacaaacttgtacaagaacccaaggaataagtagaaaattcccgtattaacaagattcaaatattcctcgcgggtcggaacctttttataatctttttcaaaacgtcggtaacgatcaattggtccagaagtaatggttggcatgaacagaatgaaacgaatgaacttccatggggaaatctctttgatcattccatcacgcgtttcaattactgttccgactgcccggaaagttaaataactaattcctaagaaaccaaggagggagttatgaccaaccattgccggtgagagcttaacaattacaatcggcaaaattgataaggcggcagtgaagtaaaaaacaccactcgaattattattttgccggtagcgatgataagccatcacaataattgtctggtaaataacataagtaattaatgaaattccttgttgccagcttgaaccatcgaacattaagaagataaaaatgaaactaattaatgcttcataccagttaaacctcttcccaaagtaaaggccgattcccaacggcaaaatagcaagaagtaagtagaagaagtataccggggttccataagcactgaaattaggaaggtttgaaatccaatcaatcattacttgttagcctcagcaatcatttgtttaactgcaatcttgccatttgcagacattgggaatgattcacggtaaacgaattgggtaggcatcatgtatggcatgattaagccgtccaagctttcacgaatttgttttgttaatccagccgtatcttcagtagattcgtttggaataacataagcgatcaggtgcgtaactttgccgtctttattatattttggaaccgcaactgcttgtttgattagaggactcttttcaagactggcacgaacttcatcaagttcaatccggtaaccatgtaatttaatttggaaatccatgcggcctttgtgatgaagtaagccatcgctgtcaagggtacccgcatccccagttcggtaagcaggcacaccatcaatcttaaagaatgacttggctgttttttctggattattcatatagccacgtgccacactattaccactgattacaatctcaccttgttcaccgggagtagtgatttcttgatcgccattccaaatggataatttaactccaggctttgcatagccaactggtaagcggtcattattttcaatgatttcaggagtaatctcgattcctgatacggcaaccgttgtttcagtcggaccataagtgttgaagattttagcatctgggaatcgttggtgtaatcctttggcagtctttactgttaattcttcgccacagaagagaaaggtctttaagcttggcattttttgttggttaaatgctgggctaagcattaacatatcagcaaacgatggtgtccctacaaatacctcaagatcaaggtttggtagagcagtgaacatctgaccaaaattttcaacaacttcgtgaggaagcgccttgattgtcccaccattaagtagtgctggtaaccagtacatgtttgaaagatcaaatgaatatggtggctgccctaagaaattagcatgttctttgattttaaattcatcacttagcatccagtcaacaaaggtcataaagttatcatgactaacttcaaccccttttggtgaaccggtagttccagacgtaaagaggacataagctagttcgtcaccattaatcattgctgaagtatcaaaagtttgcggtgttgccaaaattttttcaagctgttgatgatcgacaatcggggcatcaaactggagatcattgcttggaaaatcattaacagcaataatcatcgccggtttagcagtatccagaattgattgcatccgtggaattgctgaatcgttggacactggaatataagtatgtccagcttttagagccgctaaaaagctaataatcatttcaacttgatgatcaccatatacgagaatcggactacgatcaggcaaagattgagtactaagccatgccgctaaagtatcaactgctgagcttaagtccgcataagtggtcgttttgcccatttcatcatatgcgatccgcgttgagttgtccttggcaatttgctcaaagacggtaataatattcttactcatatattatctatttcctccgcattagaattcgttgtagataaatggctcttggcctgctccataataaccataaaggtagattaataaaagaagcactacaaagtaaaataatgtttttaagatgaattgtaatgcaggatggcgttgaataatctgagccatagttctccttctctcatctttataaatttgtaattgacattcatatcaagaataccattaattatgtatctcggctaatagggtgagttactttcaccttactgtaaagtctttaagaaaaaattaatgaaatgttcagaaataagaatgcttattgccttaaaattataactttttctgagctaattgtaactagaaaaatataaactttatttataattttatatgacatgacaatgatggactaatgtaacaataattgcaagaagtgcttattttcgataagattaagcggtagataatagtgataattaaggagacgaacgctcgatgattaaggggattggaatcgatataaccgagattgaacgagttaagaaagctgcgacagcgcattctcaattcatccagcatgtattgacaccgactgaactagaacaatatagtcaatttagcggtcaacgatcagtagaatatcttgctggtcggtggtcactaaaagaatcttttgctaaagcatatggaacgggaattggtgctaaactaggctttcatgatattgaaatcattgataaccaatatggtgcgccaattgtgattaaatcgccgtataatggtaatgctcatgcttcagtgagtcatactgccgcgttagtaatgacagaagtaattttagaaagtgagaataaataaatggttaatggtcgtttgcgagatacatcattaatagtggacttagatgcattacgtcataatattcaagaacagaaaaaagttttgcccaaaaatagtagaatccttgctgttgtaaaagcaaatgcttatggcaatggattgattccagttgcccaaacagcaatgaccagtggtgcaagtggtttatgcgtagcaattttagacgaagcattggaattgcgggataacggtattgaagccatgacacttgtccttggaattacgccagttgaagatgcgttgattgctgctcaagccggagtttctttaacagtcggctccttagattggcttgaacaatatcatcaactagcacaagttgccaagcctaagaaaccattaaaagttcatctgggaattgattcaggaatgggccggattggttttacagaggtcgctacatttaagcaagctgttaagttgcttgatagtcctgaatttgaatttgaagggatgttcacgcattttgcaactgctgatagtcctgatgaaaattactttaatcaacaggttcaacggtggcatcaatttgttgccagtcttgacgaactgccaccatatgttcatatggcaaattcagcgactggtttatggcatcgggaaaaaatcacggctaatacagttagaatggggatttcaatgtacggacaaaacccatctggacgtgacttgaaattaacgcttgatttacagcccgttagttcattagtttcatcaatttcttttgttaagcagttaaaggcaggaagatctgtcagctatggtgctacttatacagcggagcaagatgaatggctagccactttgccgattggttatgctgacggttatccccggtgtatgactggttataaggtattagttgacggtcaattttgtgatattgccggacgagtatgtatggatcaaatgatgattcggcttcctaagtattacccagtcggcactccagtagtattgatgggcaaatccggtgaccaagaaattacagcaactgatttagctgagcaggccggaactattaactatgaaatcctaactaatattagtaatcgggttcatcgcatttatcaccaaagtaaataattaagggaagcgaaggtaatgacaaaacgaaaagtaaaacggggtgacatctattacgctgacttatccccggtaattggatcggaacaggggggcgttcgtccagtcctgatccttcaaaatgacgtgggaaatcattatagtccaacagtgatcattgctgcgattactgcccaaatgcaaaaaaagaagatgcctactcatgtccaactaaaaggtaagtcgttaccgttaactcatgattcggtcattttattggagcaattacgaacgattgataaacaacgattaaaagaccgaattgctcatttgtcgccagagacaatggcaaaagtggataaagcattaacgattagtgtgggattaagtgctgcctatgatgaaaataaatgagtttgacaatttgcgtcagaactcgtatactcactattgaattaatcacggttcttttaatgtagcccagagagactacaaaagacaaaataatataagcatagtgggcacaaaactatgcttcctcttttgtaaagctctaggaccattaaagggactagagctttttaggtctaaggaggatatcttgtgaaagagcaaaaggggacaacaatttttagtattccaatgaagaacagaaagactaatacttgggatatgtttgccacgtgggtcggtgcaaatgccaataatggaacctggtttgttggcggagtgctcgccgcttgtggattttcggttgccatgaaggtcttagtattgtcatctgccttatcatatgtatttttaagtttggtaggttacattggttataagactggggtatcgacgatgactttaagtcgtgcctcctttggtgaacggggcagttatctcccatcattagttaatattactcaatttattggttggacagcagttaatacttttattgcggcccagtcggtaagcattcttttccatgacttattaggatggcctgtgtggggacaacatggcggctatttagggctagtagtcgggattattatcatgagcattctccatattattagtgtttctagcggatcacgttcagtccaaatgattgagcggttagggataatccttgttcttgtattcgtcatttgggagtcagtagctgtttttcgaaccgtttccttcagtcaaattgtaaattggcatgttcctgcgcaatcaaaaatggcagtcggtgcggcggtcgattatgtagcagcttttaatttagcctgggtaactgccggtgctgatttcacccgctttactgctaaagaaaagaatgcgactttgacgccgttccttggtgctttactaggggttgtatggtttgctttcatcggtctgatttcaacaattagtattgcaatttcaagtggggtatataacgcaaataactctgatccctcaacgattgctagtaagttaggactgggggtagttgcccttcttgttattattttgacctcaatgacggcaaatgctgttaatttattagcggccggatcagctctttcaaatatctttacaaagctcaaattaaagtattcattatggatcgtcgtattgcttgcgacagttgtgacctttattccgatgtttgtcggtagtttcttgagtgcttttgaatcattccttgactatgtggggatggtgttaggacctacgatcgccattatttgtactgatttttatttccgtgctcaccggcaatatgatgttgatgaattaggtaaaattggtggaaaatattggtatcgtggaggcgtcaactgggtagcgattattgtttttgctatcggggttgccttcttcttaggtgttcatcagttaccaatcttcgtaaatacgattggggccacatttattgatatgtgtttgagtggtatcctatattatggaattatgttgctggttgaccgaaaggaagatgaattatgctattaaaaaatgtacatgttgataatcatgaagaagtagtcgatgttcgaattctcaatggaaaatttagtgagattaaggctaacttaacgccccatgacggtgaagaagttattgacggtaaagaaaatttacttttgccaccatttgttgattctcatgttcacttagatgctacgcttactgctggtcagccagaatggaatgaaaccgggactttatttgatggtatccggatttggagtgaacggaaacaagatttaacgaaggaagatgttaaatcgcgcgcgaaaaagacattactgaatatggttggtcatggaattcaacacgtacggagccatgttgatgtaactgatcctcatttaattgccgcccgtgctcttcttgaattgcgtgaagaattaaaagaccagatcgacttgcagttggttgcttttccgcaagaaggtattcttagctatcctcatggacgtgaattaatggagcaggcggttaaagaaggattagatgtcgttggtggtattccccattttgaatttacaactgaatatggttggcaatccgtccatttcttaatggccctcgcagataagtacgatcgtttagttgacgttcactgtgatgaaatcgatgacccagcttcgcgtaaccttgaagttttagcgaccgaagcctatgaacgagggatgaaagaccgggtcactgctagtcatacgacagcgatgggctcatataatgatgcttatacttataagttattccgactattaaagatgagtgatattaactttgtatctaatccattagttaatgttcaccttggcggccgtttcgatacttatccaaagcgtcgtggcgttacccggattaaggaattaacagcagcggggattaatgtttcctttggtgaggatgatatccaagacccgtggaatcctctcggcgatggtaacatgttagatgcagttacgatgggtgtttatattgctcacttgatggggtatcaccaactgcaagatgcctttaattatgtaacttataacggtgctaagacattgcatattagtgataattatggaattgaagtaggaaaaccggcaaactgtatcttattgaatgctcacgacttttataatgcccttaataagcatgttgaagttctttataatattcgtcatgggaaagtccttgctgagacgaaaccagctgaaaccaaagttaatataaaataaaattaaagaaatctcataatagttattgacaagttagggaatggccggtatattatatccagcaattaaatttagattagaaaagcgttgaaggaaataatgatttgaaattggtaacagagaattagcgggtggtgtgagctgatcgagatttctaattgttaatcgttcctgagttaccggctgaaaccaagtaagctgaggttggctgccatccattattttggccacaaatgattgtttgtgaatgagaggatcgactacgagttgatcaaagtaggatggtaccgcgcagaagcgttcttacaattgcgataaagcaatgtaaggacgcttttttctttctaaattttaagaaaatattttgtcttggaggtaattattatgactgaattaaacgcacgacaggaagaatttgctaaggctctttttgaagcttatgacactaatacgccgttaaaagaggaagaatggaaagacgttgtgactgatgatgaaacagcatatgcagttcaagatgcggtagtaaagttaaaagggaagccaactgctggctataaagtttcgttaactagtaaagaaactcaagacatgtttgatgctgattcaccattgtatggacaacaagttgctgaacgattcctccagtcaccggcggatgttgacttgcagatgttaaatgaaccgttattagaggttgaattaaccttccgcgcaaaagaagacttacaacctagtgatacattagaagatttatttcagaaagtaactgttgcgggagccttagaattgcctgatgcccgtttcgtcgattggtttccagatttaggaaaatataatgtaatggctgattgtgctgttggtggtcttgttgtatatggtgaagaacatgatgcagatagcgtatttgaaaatgttgacgatgctgctaatgttcatgccgttttattcaaagatggtaagaaattaaaagaaggggtatcatcagaagttttaggcaatccctttaagtccctccaatggttagtacaaaaattagctgaacaaggaaaagcatttaccaagggtcaaatggtatcatccggaacatttgtcttaccacctaagctcactgctggtaagtgggaagttgagttcgatagcggtttaggaaacgttgtagttaatgcgaaataagcgttgaaagcaggtgggaaaattgggtgagaaatcgccagcagaaattaatattctaaaaattaaaaggggctgggagaaaacttttgttttctctcagcctcaaccgcttttataaacaatagtaagataacgtggaaaataaccacaaggctcgaggctaagtacgaacgataatcagcccgtgccgtgctaatcatcgttctagcttagccaaccgccttgtcgagagggttatttcccactctccttaatatttaatagctttggtgcaagtcttcaatttctgaaacttctaacccttttttctcgagtcgtttaacaatccgttccatcttttctttagtaacatcagcaggcaaggtgtataagacccgtttcattgtttcgtcttctggatcgagtgaaatgacatttacgatctgacaaaaacgagtgatttctttagcagccgttactagcgctccccgttcatcaggagtaataacagttaaaacataactcccattattcacgttccagccagcagctaacatccgtaaaagactattatgggttaaaatcccataaaactgattattgttatccaataccgcaatatatggaaggtctcgaatagcaaagaagatagagaagaaagccgcgttaattgagataaatttagtagcattctttaataatgcagttaccggtaaatgcatatccccctgtcgtgctttatgccggtaaagatgcatcttataaatatttccccgaaagatctttcctgacttatcaagaactgggacacaccgatagccggtatcctccaagacagtcagagcctcatccaatgtcgctgtttctggaagagttgttaaggttgctttgggtttgattaatgaattgaaaatcataattaacatcctttttatcgattaaatgcactcactataataacacatttctatcaaaaggattagaaaaagattagaagatttatgctgttaattcaaattagtatgctgaaaaaagtaacatagggtataatactagttaaaatttatgctggacgggaaaagtgaccgtgcggcttttttgcgtgaaaggaatgaaagaacaatgaaaatgattgttggcttaggaaatattgggacgcggtatgatgaaacccgtcataatactggctttatggtggttgatcaactagcacgagattatcacctgggagcattcacccacctaaaacaagaagcagtcgcagttagtgggataattaatggtgaaaaagtaatgttggtaaagccgacgacgttcatgaatgattcaggacgagcagtcggaccactagtagactattatgatattgacttggataatctcgtaattgttaatgacgacttggatatgccagttggcaaagtacgtttaaaaacacatggggcttcaggcggtcataatggacttaaaagcattatcagcgcgttaggaaccaagaactttaaccgggtaaaagtagggattgaccatccccaacatggaacggtggttagtcatgtcttaggtaaattttctaaagaagaacgtcctaaatttgaccaagcagttgaacaagctgagcatgcattagaagactggattaatggagaagactttgccaaattaatgaatgcttataattaaaatagaaaggtggcgttgatggtgcaaatagaaaatttaatcgagaagacgccatcatttaaacaaattacggctgacctccaacccaagaaccatcaattaataacggggatttctggatcagcgcgaaccgaattactaagtgctctttctaaagaagggcagcgaccaattctagtagtgaccgacacgatttcccatatgcaggaattggctagtgacttggagaaccttcttcctgctaatcgtgtttaccagtttccggttgaagaggttttagcagcggaagtagcaactagttctcctaactatcgtcttcagcgggtactggccttaaatgcgttgattaataaagaaccggcagttgtagttgcatctgctgcggggttacgacgcaatattatttcaccagaatactttgcccagtcctcgttaaagattaagactggcggggaagtggatccagcaaaaattcggcaacaattaagcgcaatggggtatcaatatcaaaaaatggttttgcgtcctggtgattttgcaattcgtgggtcgattattgatatctacgccttaaacactgataatccgattagaattgatctttttgatacagaagttgattcacttcggtattttgatgctagtactcagcggagtattgataatgttgaagaagttcagatactgccagcgacagattttattatcccatcgactgaattttcgcgggtgtatgaagcgctagatactgaatataaaaaggtggggaaggagttaagtgctgacgatgcggatattaaacagcaggtggctaaccgctttgaaccattattgaacgcacttaagaaccagcacttgcctaatgaacttttagaatttagcaacctggtttatccggctaagcattccttatttgattatcttcctgatgatgggacaatttactttgatgacttgacgcggataaagcaatttgccaagcagatgacccaggaagatgcaggctggtttaaagataaggttgctcaccatcaattaacggatgttccagatcttagcaatgacgtatcggccataataaaaaaagacccgcatccgcaaatttatggcgccttatttaaaaaaggtctcggtaatattaaacttagccaaattaccgacctaaaaagcagaaccatgcaacgtttctttggtcaaatgccactgctgaaagccgaacttcagcggtggattgatcaagggcaaacggtagtactgatggctaatagtccagaacggcgaaagcaaattgcccaaacgcttgctgactttgatatcaccgcaacagaaactgaattaacaaatatcaagccgaatgttgttcaaattgttgctgctaacttaaacaatggatttgaaatgccacttgctgggctggttgttattacagaaagcgagatgtttaagcaggtaaaaaaggttcatcatcgtccacaaaaacttgccaacgccgaacgattaaaaaattatactgaccttaaaccaggtgactatgtagttcatgtcaatcatggaattgggatttttagtggaattaagacgatggaagttgaccatgttcaccaagactacatgatcatcaattaccgagataacgctcagatatatgtgccagtaacccaactaaatcttgtccaaaagtatgtatcatcagaatctaagaccccgcatatcaacaagcttggcggtaacgaatgggcaaagactaagcggcgcgtttcttcaaaaattgaagatatcgctgatgaattagttgacttatatgctaagcgagaagcggagaagggatatgcttttccgaaagacgattatctccaaaaacaatttgatgctaattttccatataatgagactcgtgatcagttgcggagtattgatgaaattaaagaggatatggaaaaaccaaagccgatggatcgactgttggtaggggatgtcggctatggtaaaactgaagttgcaatgcgggcaatttttaaagcagtcactggaggaaagcaggtggccttccttgtgccaacaactgttcttgcccagcaacactacaacaccctgatgcgccggtttgagggcttcccaatcaacattgccttgatgtcacgtttcaagacgccaaaagagctaaaagagacagaagcagggctaaaggatggaagcgtcgatgttgttgttggaacccaccgaatcctatcaaaggatgttgaatttaaggaccttgggctgttaattgttgatgaggaacagcgctttggggtaaaacataaagaaaaactaaaacaattaaaaaataatgttgatgttttaaccttgacagcaaccccgatcccccggacattacacatgtcaatgctgggcgtacgagatttatcagtccttgaaacaccgccagctggtcgttacccaatccaaacctatgtaatggagcaaaatagtagtgcgattcgcgatgggatcattcgtgaaatgcaacgcggcggacaggtttattaccttcacaatcgcgttcatgacattgaagagacagtggcgtggttacaagaccttgttcctgaagcccggattggctatattaatggtcagatgagtgaaaatgaactggagacagtcctctatgagtttattcaaggaaattatgatgtattagtgactacctctattatcgaaacgggggttgatatcccaaatgctaatacgctctttgttgaaaatgctgatcggatggggttagctcagctatatcagattcgcggacgaattggtcgtagtaatcgggtggcttatgcttactttatgtatcagcctaataaggtcctaacagaattaggagaaaagcggctagctgcaattcgtgattttaccgagttgggatctggatttaagattgcaatgcgagaccttgctattcggggagctggtaacctcttggggaaacaacaacatggatttatcgattctgttggttatgacctatattcagcgatgcttagtgatgcggtagctaaaaagcagggtaagaagcaaactattcactccgatgcagaagttgagttaggggttgaagcttacctaccaacggattatattgcagaccaacggcaaaagatcgaattatataagacaattcgccaagctaagacagatgaagaagttattgatattcaaggtgacttgattgatcggtttggcgattacccggcaccggttgggacgctgttgcttgtcagtcaattgaagaatcatgctgacctggcaatgattgctgagattaagcggcaacgtgataatattaatatcaagtttactgaacgtgctagccgcttgattaaagcccctgcaataattaaggagctagctaatacgcgatttaaagcaacaatcggtgaagacaatcagcaactaacgattcggctggttattcaacctaaaatgactactgatgattggcttcaccagctactacaatttgtaacgactttaggaaacgttattcaagccgatgaaaaaggagcggaaaaatgagattagataaatttttaaaagtatcacggattattaaacgtcgatcaattgctaaggaaatcgcggatcaaggacggatcttaattaatggtcaaccagcaaaatcatccagtcgggtagcggttggtgatactttaacaattaagtttggtaataagacagaaacagttaagattaatcggattgttgaaacgacgaaaaagagtgaagcggaagatatgtatgaaattgttgatgaaacttacgcggaatcctttgaccaactataatatcttctgagatataaaaaagttgataatcatatggacattctccgcggtatcttgctatacttaaagcgtgataagttaaaatggaggggaatgtcagatgaaaggacaatctgatagcaaagtttcacaattaaataccccatatgcccgccaggtttcgaatcaaaaaacatataatcggcatgtgcataagcgccgttgtcagcggattattgccgtttttttggttatattcttaatctttggaattcagatatttcaaagcaaacggacattagcagatattaatggcaatattcgacaagcacaatcacaattaacaaaacaaaaacaaaagaatcaacaactacaacgtcagattaaaatgttgcataatcccgaatatattcagcaggttatccgtgctaagtataattactctaagaagggcgagataatctataatttgaactaatgatcacaaaataggatgtttttagtagggttagaatattttaaatgttaaaattgagaatgtaattgggtgatttttcagcttagttttttatgagaagtttagttattttcatacgttttcaagatgaagttatgatatactcaaatacaaaaatatgagatggttcaggaggatctataggtttcatggcaattgaagttggagcaaaggtttcaggtaaagtttcaggaatcactaattttggtgcattcgttgatttagatgataatcagacagggctagtacacatcagtcaaatctctgataaatatatcaaggatgttcatgatgtattggctgtcggggatgaagttacagcaaaagtaacacggattggtgatgacggtaagattgctctttcaatcaaggctgcagctcctcgtgaacatcaagatcatcatgaaaataaccatcatcgtgaaaataatcaccgtgattttcaccacgaacggaataataatttccgtggtcacaatgataacttccgtggtggttttagtggtcgtcaccacaacagtcaccaacacgaagactttaatgacatgttagctggctatttaaaagaaagcgaatcacgtttatctactttgaaacgtcaaactgatggtaagcgtggcggccgtggtggtcggcggagctaatatggcggatttacaacaagcatttgagcgacacctagtaaggagtcgcttttttgctacccaagataaggtggtagtggctgtctcaaccggagtcgattcgatggttctgttagatctcttgcaacatttgccgttaaaatatcgtccccagattatcgttgcccatatgaaccatgagttacgaaaacaaagccagcttgaagaacggttcattcggcagtattgtaaacaaaatgatttaaaactagcagttgcacactggccacaagatcttcatccacagaccggggtcgaaaacgctgcccgtcaagcacgctaccaatttttccgggaagtgatgaaagataatcaggcaagcattctgctaactgcacaccaccaaaatgatctagcagaaacaatgctgatgaagatggctcgtggtggtcagttgagtcaattagtgggaatacgagatcggcgaccatttgcttctggaaccttaattcggccgcttttaccctttagtaaacagcagttaaagaaatatgctttgcagcatcatcttaagtggtatgaggataagacaaataaggacttgaacattcaacggaatcgatttcggcatgcgataattccaatgcttgaagaagagaatcctcagttgctttctcacctcgaaagctatcatcaacagttaacggatctccttgcctggcgtgatcaagaagtggcagatcaattagcagcatgtgttgatcaacaaggaaggatgatcctggcaagattattgcaaaataaggaaatcattcgaaaagaaattttacgacaatggtttaatcaacaaggaatatatgatattaaggaccagcaacttgatgaactgctgcagatcctagaaaacgagcaaaagccacagcaaatcattgagttgccgcatcgatatattcttgagaaagcctacgctacttgtgtgttaaaaaaattggataatccgcttgagaacctacaaaagccccaagatcatgtgataaaattggaacaatggtatcaagtagatccaataaacttaatggcagtgtcagctgaaaagtcgtttttcaatgatgaagagcaggtagttttgcaatggcttgctccagatcaatttccgctgcgtctacgacaatggcgacaaaaagatcgtattcgcttaaaaaatggtcatcaccagttagtcaagcgggtcctaattgaccaaaaagtttcccgaaaacagcgtgaccagcaaatggtcctagttgatgcgcatgacgaggtcgtctggatagttaaccgaaagtggagttggtttgaacggccaaccggctatcagcagacatgtcggtcatgttttattggaataaaaaataaggagaagaaggtaaatgaataacgatattgagcgtgtcttatacagcgaagaaatgcttggcaaacgaatggacgaattagcaacggacttaacaaaagattataaggataaacggccaattatcatttccgttctaagcggagcagttttatttactgttgatatgattgaacggctagatatcatggcccaaatcgactttattgatgtttctagttattttggtggcttaggttcgactggaaaagttaaacttattcatgatttgaaaacagatgttaaagatcggcatgttctaattatggaagatattgttgataccggtcatactttgaagtacttgatggaccttttagccgaccggggagcaaagagcataaaggtttgttcattattaaataagccagaaggtcgggaagtagatgtcgaacctgattatgttggttttacggttcctaaagagttcttggtagggtatggccttgattacaaaggattctaccgaaatttaccgtatgttggaattttgaagccatctgtataccaaaatgactaaaaatgttagataattaggatgacggaaaaatcaatattaaatggacggtattttaaagatattcttaattaacgtccatttttatggatccgtaaatatgtagtatgtattattaataacattggcgataaaactattaattcttctgtaaaattaatggtcaatatttgtcaaatatgctatgataatgactacaattataaaatatcgttgctggtagataggaggttgttatgaacaacaatcgtaaaaaaaataattttactcataacgttctcttctatgccgtgatgttcttgtgtattatgggaatcgcctacttcttctttgggggcaatgcctcaacaggacaaagtaagacagtttcccaaagcgagtttatctccgaactgaagagtaataaggttaagagcgttcagcttcagccaaatggtggggtatataaggttacgggtacttaccgtaaacctcagtcaaacaatgacaattccgccaacaatactggctttgctcttacaccacaacgaaacaataaggtaactcaattccaaagttctgttttggaaagtgacgtaactgttagtcaacttcaaaactatgctaaccgtcataatgtaaagattagtactcgtgctgaagaatctaatagtgtctggatgaacctgttgttgactgtcttgccattggtcatcatgattttcttcttctacatgatgatgggccaagctggtcaaggtgggggtggccgtggagtgatgagctttggtaagaccaaggccaagccatctgatgctaagaaaaacaaagttcgtttctcagatgttgccggtgaagaagaagagaaacaagaattggttgaaatcgttgaattcttgaagaatccaaagaaattcactaagcttggtgctcgtattccatctggtgttttactggaggggcctccaggtactggtaagaccttgctagctaaggcggttgccggtgaatcaggggtaccattcttctcaatctctggttctgactttgttgaaatgttcgtcggtgttggtgctagtcgtgttcgtgacttatttgatcaagccaagaaagctgctccagcaatcatctttattgatgaaattgatgccgttggtcggcgccgtggaaatggcatgggcggcggtcacgatgaacgtgaacaaaccttgaaccaattgttagttgaaatggatggtttccaaggcgatgaaggaatcatcgtcatggcagctactaaccgttcagatgtcttggatcccgcccttttacgtccaggacgttttgaccgaaagattttagtaggtcgtccagatgttaagggtcgtgaagccattttacgagttcatgctaagaacaaaccaatggcaagcgacgttgatttaaaggaaattgctaaacagactcccggttttgttggggctgacttagctaacctattaaacgaagcggccttattagctgcgcggcggaacaaaactgaaattgatgctgctgacttagatgaagcagaagaccgggtaattgctggaccagctaagcataaccgtgtccaatctgaacaagaacgaaagactgttgcataccacgaagcgggtcacacgattgtgggtcttgtattaaatgacgcacgagttgtgcacaaggttaccattgtcccacgtggtcgcgcgggtggatatgctatcatgcttccacgtgaagatcagatgttaatgtcgaaaaagaatgcgatggaacaaatcgctggtctgatgggtggacgagctgctgaagagcttgtctttaagtcacaatcttcaggagcttcaaatgactttgaacaagcaacccaaattgctcgttcgatggttacccagtacggaatgagtgataagattggtccggtagaactgcaaagttctggtcaggtctttacaggtcaaggctatgaccaatcaccttactccgaaaagactgctgctttagttgatgaagaagtacgtcgaatcttaactgaagggcacgaaaccgccttacacattattgagacgcaccgtgaacaacataagcaaatcgctgaagcattactcaaatacgaaacgcttgatgaaaaacaaattcttagcctttataagactggaaaagttcctgataaggatgtggctgctgaagacgaagaggcacgtgcacaaacctttgaagaatccaagcgtgaacttgaacgattggaaaatgagcgtcacgatgaagcaaaggataatcaaaatgattcatccgatactaagagtgacaactcaaatgattcacaatcaagtgatgattcagacaattctgaagacaagtaaactattgaaaagacggaagatacaaaacctgattggtaggtggtgatcttccgttttttctttaggattaattttaaggagaaatttaaaatgaaaacaacagattatttagtaaagtcaatgactaaggatggaaagtttcgggcttatgctgtaaatgctacccaagtcgttcaaaaggcacacgaaattcatgatacatggagtgcttcttcggctgcccttggtcgaacgttaattggaacgattctcttggctacttctagtttacaaggagaagcaggaatgacggttaagattcagggaaatggtccagttggctttattattgcggatggaactgctgaaggaaccgtaaaaggctacatgggtaatccacacgtttctttaccagccaatgataaggggaagatcgatgtcgcaaaggcaattggtaatcaaggaactctttctgtaaccaagatggctcctggcgacaagacaccatataccggcgaagtaaatttagtttctggtgaacttggtgatgactttacttactaccttgctcaatctgaacaaattccttcagcagttggcctttcagtattcgttaaccctgatgaaaatattgacgttgctggtggcttcatgattcaagtaatgcctggtgctagcgatgaagaaatcagcaagcttgaaaagacattgaagagcttgccattggtatcacaaatgttacgtgatggtgatacgccagaagatattttaaagaaaatttttggtgatgacttaaagatccttgaaacgatgccggttcgttatgcatgtgattgctcgaaggagcgttttgcacatgcccttgcaagtatttctaaagatgatatgaagaaattgattgacgaagaccaccatgcggaagctgtttgccaattctgcgggaagaagtacgaatttagcgaagacgaattaaagaagatctacgcggaaatgactgcaaatgatgataaaaaatcaacagatgaaaagtaatttttggtgctaagcgtgttgatatgctatgatagttgagttatcggacaattaaaaatgaaactggatggccagcacagtttcttaagcagtaatgaggtgaaaaaatgaaatggaagatcggtaacgttgaaattcctaatcaagttgttgttgcaccaatggctggagtaaccaattcagcctttcgggttatctgtaaaagatttggtgctggctacgttgtctgtgaaatgatctcagaccgtggcattgtgtatcataatcaacgaactttaaatatgatggatgtcgacccggaagaacatccaatgggaattcaaatttttggcggaaccaaagagacattagttgaggctgctaagtatgtagatcaacatacagcagctgacgtgattgatataaatatggggtgtcctgttaataaggttgtaaaaactgacgcgggtgcacggtggttactggatcctaataaagtctatgaaatggtgtcatatgttactgatgctgttaagaagccagttaccgttaagatgcgaactggttgggacgacaagcatattttagctgttgaaaatgctttggcagctgaacgtgcaggagctagcgcgattgcgatgcatggtcgaactcgaaaacaaatgtatacgggacaagcagattggaatatactaaaagaagtagcgagtcaattgaaaattccgttcatggctaatggtgatgtgaagacaccagaagatgctaagaagattcttgatatgactggcgcaaccgccgcaatgatcggtcgggcagcaatgggtaacccatggatgctaaagcggactgaacattacttagagactggtgagctgctcccggaagcaaccccagaacaaaagattgaaatggccaaagatcatcttaatcgtttagttgatttaaagggtgaatatgttggagttcgtgagttccgtgggttatccacgtactatatcaagggtattccgcgtgctgcccggactaaggtagcgttagtcgaggcagaaacacttgatgaaatgaacgatatttttgaccgctttgctgaacaaactgcagaacgagctgcaaaaagacagcaagcttaattacgaggaggagaacttaagtgtcacaagaactagatcaaatgcgcgttcggcgtgaaaaaatggaagagttaaaagaagcggggattgaaccgtttggccgtcgcttcaaacgagaccatcttgcccaagacttgcatgataagtttgatcaatacgataaagaagaattaaacgagatgggcgccaaagtaattattgcgggtcgaatgacaagaaagcggagtagtggtaaggctggtttcgctgactttgttgatcggactggtaagattcaagtttacgctcgtaaggatatggtcggggatgagccttaccatgttttcaagcggtcagatattggtgacttccttggaattgaaggggatgttatcaagacggatacaggtgaattaactgttcgtgcacataaaattaccttcttgtcaaaagcattgcgtccacttcctaataagtgggatggggttactgatcctgaaactatctatcgtcagcgctaccttgatttaatttctaacccagaaagtttcaagcgtttccaccaacggacagcgatcatcaaggccgtccggaagtacatggatgataatggctttacagaggtagaaaccccaattttgaacactcaagctggtggtgctaatgcgcgtccatttatcactcaccacaatgcgcttgatattgatatgtacttgcggattgctaccgaattgtaccttaaacggttaatcgttggtggctttgaacgggtatacgaattgggccggattttccggaatgaagggatggaccctcaccataaccctgaatttactacaatggaaacttatgctgcttactttgacttccaagatgttatggatgaaacagaaggaatcgttaaggcagcagctaaagttgtttcagatgatggaaagattacttaccaaggacatgaaatcgaccttggagggaactttaaacggatcacgatggtggatgccgttaaggaaaagactggcattgacttcagcgatgaatcaatgacggacgaagatgctaagaagttagccgatgaacacaaggtcgaatataagccttactggacaaaggggcatatcttgaacgcattctttgaagagtttgttgaagatacacttattcaaccaacttttgtctatgaattcccagttgaagtttcaccattagcaaagcggaatgctgataatcctgcgatgactgaccgtttcgaattgtatgttgacggtagcgaattggcaaatgcctttagtgaattaaacgatccaattgaccagaaggaacgttttgaaatgcaagcaaaggaaaaagctaacggtaatgatgaagctgaaccagtcgacttagattacgttcaagccctcgaatacggaatgccacctactgggggacttggtattggaatcgatcgtcttgtaatgctccttactgatgctaaatctattcgggatgttattctcttcccaacgatgcgtccggaaaaggaaactaagaacgattcaaagaaaaagaagaacaagaagaagtaagctgaatggttgatgaaaaattagcataaatagataactcgtattccatttttatggggtgcgagtttttctgttttagttatgttagaataactatcaatttagaggagaaatgaggggaattgatgggagaattagaaaagttaaagcaagactgtatagtaaaacaaaagcgtgggttgcatataataattgcttcgatcgtagtatggggcggtattcttgcagtagaactacttaatgttcccgttcttactaaaaacttattcgtatttgtctgtacggccttacttttaccaatatcttatttcatatcgcgattaattaatgtggattttcaaaataagacaaatccgttaactaagttggggatgttattttcgatgaatcagcttttgtatcttctaattgcaatgtggatttatccgactattcccaataaaatgctaatggtgttagcgataatatttggtgctcatttactgccatatagttggttgtataattctagggcttattttatttcatcgatagtaatttcaatattagctttattggtgggaactaattttaaaccgtttattttagcatcagttatgcttaccatagtagtagcattttgcattaccttaatattagaaaatcatcaacttgactgaagggctccgatccgtaaagaagatcgaagccttttttactatattattttaattcttgtgaaacttctaatagtagaaaaaacaattgcaaaaagagactaatagttatcaaggaatgttcctaacaatctatccaagaagatataaaaattgaattggtccggctattcagctactgatttaatggctgaataataatttccagcgttaagataaaaattgaatgggtaaatatatcgagttactaaccgagtttaatattgatgcttttctccatactaattaggtgattttcgggatggaaaagaaatgctaattggtaagaatggtaaaggaggcaggcaaacttattaaaggaatagtgagtttaagaagctaatagatagcgatgaaaataaaattcaaaaaagttgaaaaaaggtgttgacgaaagaatgaaatccatgtatagtagttatcgttgtcaaaacagctaagtgctgttgagatggtttaacaaaaaagttaaaataattgttgacatcgacttggcaacatgatatattaataaagttgctgattgagttatcgatcaaaagaaattaaaaaataatttaaaatttcttcttgacaagttaatccgatgcatgatataattaaattattgattggctgcttaattagccgacaggtagacctttgaaaactgaacaaagtttcgacgaatcaaatgtgtagggtcttcaatcacgatgtgatttgaagcaaaacatttgcgaagtcaattcgcttaataacaaagataattgagagctattcaagttcttatatattttatatgagagtttgatcctggctcaggatgaacgccggcggtgtgcctaatacatgcaagtcgtacgcactggcccaactgattgatggtgcttgcacctgattgacgatggatcaccagtgagtggcggacgggtgagtaacacgtaggtaacctgccccggagcgggggataacatttggaaacagatgctaataccgcataataacaaaagccacatggcttttgtttaaaagatggctttggctatcactctgggatggacctgcggtgcattagctagttggtaaggtaacggcttaccaaggcgatgatgcatagccgagttgagagactgatcggccacaatggaactgagacacggtccatactcctacgggaggcagcagtagggaatcttccacaatgggcgcaagcctgatggagcaacaccgcgtgagtgaagaagggtttcggctcgtaaagctctgttgttggagaagaacgtgcgtgagagtaactgttcacgcagtgacggtatccaaccagaaagtcacggctaactacgtgccagcagccgcggtaatacgtaggtggcaagcgttatccggatttattgggcgtaaagcgagcgcaggcggttgcttaggtctgatgtgaaagccttcggcttaaccgaagaagtgcatcggaaaccgggcaacttgagtgcagaagaggacagtggaactccatgtgtagcggtggaatgcgtagatatatggaagaacaccagtggcgaaggcggctgtctggtctgcaactgacgctgaggctcgaaagcatgggtagcgaacaggattagataccctggtagtccatgccgtaaacgatgagtgctaggtgttggagggtttccgcccttcagtgccggagctaacgcattaagcactccgcctggggagtacgaccgcaaggttgaaactcaaaggaattgacgggggcccgcacaagcggtggagcatgtggtttaattcgaagctacgcgaagaaccttaccaggtcttgacatcttgcgctaaccttagagataaggcgttcccttcggggacgcaatgacaggtggtgcatggtcgtcgtcagctcgtgtcgtgagatgttgggttaagtcccgcaacgagcgcaacccttgttactagttgccagcattaagttgggcactctagtgagactgccggtgacaaaccggaggaaggtggggacgacgtcagatcatcatgccccttatgacctgggctacacacgtgctacaatggacggtacaacgagtcgcaagctcgcgagagtaagctaatctcttaaagccgttctcagttcggactgtaggctgcaactcgcctacacgaagtcggaatcgctagtaatcgcggatcagcatgccgcggtgaatacgttcccgggccttgtacacaccgcccgtcacaccatggaagtttgtaacgcccaaagtcggtggcctaacctttatggagggagccgcctaaggcgggacagatgactggggtgaagtcgtaacaaggtagccgtaggagaacctgcggctggatcacctcctttctaaggaataaaacggaacctacacatcgaagaaactttgtttagttttgaggggtttaccctcagagcttgtactttgaaaactaaatactatctaatttctttattaacaaaacaataaaccgagaacaccgcgttatttgagttttaattaacgaattataatcgctaactcaattaatcagacaatctttgattgtttaggttaagttatgaagggcgcatggtgaatgccttggtactaggagccgatgaaggacgggactaacaccgatatgcttcggggagcggtaagtacgctttgatccggagatttccgaatggggcaacccaatcagcttagtcgctgattacttgactagtgaatacatagctagtaagaggtagacgcagtgaactgaaacatcttagtagctgcaggaagagaaagaaacatcgattccctgagtagcggcgagcgaaaagggaagagcccaaaccaacaagcttgcttgttggggttgtaggactgaacattagagttaccaaagtgcgacgtagtcgcaacagttgggaagctgtgccatagagggtgaaagccccgtagacgaaacgtcacactctctgttcaggatcctgagtacggcgggacacgtgaaaccccgtcggaacccgcgaggaccatctcgcaaggctaaatactccctagtgaccgatagtgaaccagtaccgtgagggaaaggtgaaaagcaccccggaaggggagtgaaatagttcctgaaaccatgtgcctacaagctgtcggagcccgttaatgggtgacggcgtgcctcttgcagaatgaaccggcgagttacgattacatgcaaggttaaggtggaaaaaccggagccgtagcgaaagcgagtcttaaatgggcgtaaaaagtatgtagttgtagacccgaaaccaggtgacctacccatgtccaggttgaaggtgcggtaaagcgcactggaggaccgaacccgtgtcagttgaaaatggctgggatgaggtgtgggtagcggtgaaattccaaacgaacttggagatagctggttctctccgaaatctctttagggggagccttgaggtaaagaatcgtggaggtagagctactgtttggacaaggggcccgtcatgggttaccaacttcagataaactccgaatgccatcgatttatactcaggagtcagacgatgagtgataagatccaccgtcgaaaggggaacagcccagatcaccagttaaggtccctaaatatatgctaagtggaaaaggatgtggagttgcatagacaactaggatgttggcttagaagcagccaccatttaaagagtgcgtaatagctcactagtcgagtgatcctgcgccgaaaatgtaccggggctaagcatattaccgaaactgtggatgtgcactatgtgcacgtgataggagagcgttctaagggcggcgaagtcagaccgtgaggactggtggagcgcttagaagtgagaatgccggtatgagtagcgaaagacaggtgagaatcctgtccaccgaatgactaaggtttcctggggaaggctcgtcctcccagggtaagtcgggacctaagccgaggccgagaggcgtaggcgatgggtaacaggttgagattcctgtaccagttaactgcgtttgacgatggagggacgcaggaggctaagcaaaccgtacgactggaagagtacggccaagcagtaagtcaggatgtgagtcaaatgtttacatccgtgttgacaagctgtgatggggagcgaaattaaagtagcgaagttgccgatgtcacactgccgagaaaagcttctaaggagtagttaactgcccgtaccgcaaaccgacacaggtagtcgaggagagaatcctaaggtgagcgagagaactctcgttaaggaactcggcaaaatgaccccgtaacttcgggagaaggggtgctggccgcaaggccagccgcagtgaataggcccaggcgactgtttatcaaaaacacaggtttctgcaaaatcgtaagatgaagtataggggctgacgcctgcccggtgctggaaggttaaaaggatgggttagcttcggcgaagctcagaattgaagccccagtaaacggcggccgtaactataacggtcctaaggtagcgaaattccttgtcgggtaagttccgacccgcacgaaaggcgtaacgatctgggcgctgtctcaacgagagactcggtgaaattgaaatccctgtgaagatgcagggtacccgcgacaggacggaaagaccccatggagctttactgtagcttgatattgagtgtttgtactgcttgtacaggataggtaggagccgtagaagtcgggacgctagtttcgacagaggcgctggtgggatactacccttgcaatatgaccactctaacccgcagcactgaacgtgctgggagacagtgtcaggtgggcagtttgactggggcggtcgcctcctaaaaggtaacggaggcgcccaaaggttcgctcagtatggttggaaatcatgcgcagagtgtaaaggcacaagcgagcttgactgcgagacagacaggtcgagcagggacgaaagtcgggcttagtgatccggtggttccgtatggaagggccatcgctcaacggataaaagctaccctggggataacaggcttatctcccccaagagtccacatcgacggggaggtttggcacctcgatgtcggctcatcgcatcctggggctgtagtcggtcccaagggttgggctgttcgcccattaaagcggtacgcgagctgggttcagaacgtcgtgagacagttcggtccctatccgtcgcgggcgtaggaaatttgagaggacctgtccttagtacgagaggaccgggatggacataccgctggtgtaccagttgttccgccaggagcaccgctgggtagctatgtatggacgagataaacgctgaaagcatctaagtgtgaaactcgcctcgagatgagatttcccatttccttcgggaaagtaagacccctcagagatgatgaggtagataggatggaagtggaagtgccgtgaggcatggagcggaccattactaatcggtcgaggacttaaccaaggagcggtaaggtttattggaagagaatagataggatttagttttgagagcacaagctctcgtccgaagggacaaagagtgtggtgatgatggcttgaaggatacacctgttcccatgccgaacacagaagttaagcttcaacacgccgaaagtagttgggggatcgctccctgcgaggataggacgttgccatgcgttattccggcatagctcagttggtagagcacctgactgttaatcaggttgtcgtcagttcgagtctgactgccggagtcgatgaagatgttgactaccttcggttagttaacatctttttttgccaacttagctcagctggtagagcatctccctcgtaaagagaaggtcggaggttcgactcctctagttggcattatgaaaggtttataaccaattagaagtctacagattaagccgataaagcttattatgtaggcttttttgtatacttaagaagttaagtgaattgttcgtaagcagtcaataacagtacgtctagctctagctaccccggatcttctatactgagactatcatcagtaaggagattttttatttatgacagaacaaaatgaaattattaccccagttttcaaaaacaagccaagtaatttacaaaagcattcttttacggcacgccctgccgtaaaaattaatgtgaatgaagtcgaattaacgattttcaaggggactaattctgttttagcttcggatatcgttaaagtggttattcgttatgctcgttaattggcatgacccagattatatctatttagtctgtggaaaaacagacatgcgaaaaggtattgatgggctcgcaatggtaatcgctgagaactatggattagaattatataataattcgcttttcttattttgcggcggacgtaatgatcgctttaaaggattgttttgggatggcgagggctttattatgctctataaacggtttgaaaatggccaccttagttggccgagaaacagtaatgaagccaaagaattatctgctcaacagctcgactggttattgcaaggactgaacccattaccaattcgtaaaattcaagctgttcgaccaggaagtttttattgagttacctctatttaaaagaagaattctttgatataattaccaaagaataattcaaaggaggtgacgtaccatgaagcaaacagcggaagaacaaatcaaagaacttaaacaacaattagctatggccaatgaaaagattgctcaattaacagctattatcaaacttcaaaagaaccaaatatttgggaaaaaaactgaagtaatggagcccatcgttgatggacaacaatccttatttagtgagcaagaaatggatcaacttcaagatcctgatatttcagtcacggaagtgactgaaaagaaaataaagcaagtggtgcgtcaccggaaagcaaaacaatctggtcagcggaccacttttttagatggtttaccacaggttgaagaagttattccattaaaagatactaactgcccacactgtcatcaactaatgaaaaaagtgggtcaacatgtatatagtagagaagcacggttaaaaccggctgaattatattgtgtgaatttgattcaagaaacttataaatgtaatgagtgtattaattctaatggtagcgatgtacttgtcagtagtaagatgccacagagtcttttaccccatagttacttttcgagtactattttagctaaagtagcagagttgaagtttaatcttgctttaccgtttcatcgtcaaattaagttttggcaagtcgtcggcttacgagttgatgctcgattattggcgactaacatcattaaggttagtcaaacctaccttgaaccgttatatgattatttacaggaattaatcagaaaagaatcggtaattcatatggatgaaactccattcaaggtaattgatgagcctaatgaaactggctacttttgggtaacgcgatcaacaaaagaattcagtaagcatcaaattatcatgtttcattactataatacccgcgcgggtaaaaccattggtcaaattatcggtcatcaatatcgtggaattattatgtgtgacggttatggtggatatagtgatcgattatatccccaggcaaaatttgggtcatgtttagttcatattcgacgtgaattttatcacattacatgtttattgaataaggagcaattgaagaactccaaagcataccgagttttacagctaatgcgaccgatctttcatgaagagaaacaattaacatattccaatcataaggaaaaactagtgtaacgtcggttgcacgtgaagcctttgatggataagttatatacttatttagaaaatatcagttttcctcaaggacggttgaaagctgccattaataatgctttgaagctaagaaagcgagtatatcaaatatttgaagatggtcgagtgccgttaacgaataatccggttgaacaagcgattcgtccatcaactcttattcgaaagaatagcttatttgcgaaaagctctgctggagctcagtcaaataccattttctatactttggtggcaactgcaaaccagaaccatttaaatatctacaaatactttaagtatctttttgatcacttaccaaaccgcaaggacgcaggactttaggcttatttgccatggtcaaaagaaattcaagcaaaatgccataaataaaacggggtcatgaattaccattttcggtagctcatgatcccaattttttcaatccgtactgttattgactgcttacgatccaccacgctcaaggcgagaaataaaattaattgatagattgcttaactcagcaagttgttgttgggtcatatttaattcatggcgacggttagcaatattttttcctaattgttgttccatagttgattattccttgttttttattttaagggtaatatgattatatactaaagtcgctaaacggatcgaacaaaaagagaatatgatttattgaaacttaatctcagctaaaaatcagtacctaaccttcatgttattacattggttcaacaaaagtaagctgttaaaacttcttatgattaagtagagcagaaaataaacaaactcctacttgaaaatatttctagacaaattttaaattagcttgacgggtataaggatataatatataatgatatccgttgagttattccggcatagctcagttggtagagcacctgactgttaatcaggttgtcgtcagttcgagtctgactgccggagtcgataaagatgttagctgtttggctagcatctttttttataccttctaaacatctttttaatattctaaattgcatatctccagtttttaacgatagattattaatttttatatcaaaaaaattgtagaagttttaacatgagaatatactaaaactgtaactagtttcatatgtagtttaggagaatggaggtatttataatgcgatttagtaaagcaatccttgttgcaacaagcataattgcaattgggctatgtacaagtggctgtagtagttttagcacgagttccaacagtagcaagagcagtaagtctcatcagcaaaaaagaggagtcacatattgtgggctcgtatcgtgatgatgccgatggagctgctattacccttaattcagatggaactgggacatatgtaatggaaaatccgacgcagactgatatattcttgatcaattgacctggaaacaggaaaagaataattacatcattaatttaaatgatagtaattatgatacgccaattgatgcgcggctaaatgaagataatttgagccttgtaggtaacgatgaatggcctaatcagtcatttaaacgagttcatggggactttgacgttgataatttctcaaaagaacaacatgcgaaaactaacagttctacaactaaggatactcattctaaggaatcatcgactcatgcccgcgcagcacttaaaaatgggcgagtgaccaccacaaagacaccagcaagattgataatttgaaggctacgactgacctatctgagccagatgaaggttgggcctgatgataatggaactgaatgtgccattgttcgaaatggaaaagtttacccacgtccggttattgatggtgatacgtcatctaattaataatcttagcgacaaacttaataaaataaacaattatagctcatacatgcgtttgcgttctcatcaaaaacttatttttcaattgacgatgttttgaaacacgtttataatagtactattctgaattttattgttaaagttttttaatgtttagaatacgtattcaattaacattgtgctaattgaaaagtgaaattatttggaggaattgtatgagtaaacaaaagaatttggatacctccttctttggacaaccgcgtggattgtcgacattgttcttcactgaaatgtgggaacggtttagttactacggaatgcgggctatccttctattctatatgtactacgctgttaccaagggtggtttgggtatggaccaagctaccgcagcatcaattatgtcaatttatggttcattagtttacctggccagtgttgtcgggggatggttatctgaccgtgtatggggatcgcgtcgaacggtcttcatcggtggtgtccttattatgtttggacatatcgctctgtcattaccatttggtgtgtcagcactttatgtatcaatcgctttgattgttattggtaccgggttattgaagccaaatgtttcagaaatggttgggggcttatatagtcctgaagatcgtcgtcgagactctggttttagtatgttcgttttcgggattaacttaggggccgctgttgctccttgggctgtcccttgggctgctaatggctttggcttaaaccttttccatggtgaaatgaacttccacgctggtttctcactagctgctatcggaatgttctttgggttagtacaatatgtagttgacggccggaagtatctttcaaaagatagcttatatcctgatgatccgatcgataaggaaagtttacgtccagtaattatttggtcaattgttggtgttattgcattagtgatcattcttggattgcttgcggcaatgggtcaattaaacatcaataatatcattacaatcattacggttattgctattgctttaccaatctactactttgtaatgatgttgaattccaagaaggttacaaaggatgaaaagtcacgggttgttgcttacattccacttttcattgctgctgctatcttctgggcaattgaagaatcaggttcagttgttttagccctcttcgctgaacaacggactattttacacattggtggctggcactttgctgctgctaacttccagacattgaacccattattcattatgatcctaacaccatttttcgttgcactttgggatcactggaaaaaacaaccaagtgctcctggtaagtttgctgctgggttagtaattgcaggtctttcatatgtttggatggcacttccagcaatgattcacggtacaactgctggacgggttagcccattctggttagttggttcatggttcattgttgaaatcgccgaaatgttaatttcaccaattggtctttcagtaactactaaacttgcaccaaaagcatttaagtctcaaatgatgagtatgtggttcttggcggatgctgctggacaagcggttaacgcccaggttgttaagtactactcatcagctacagaagttccatacttcttaattatcggggcagtaagtatcgtcttcggattgatcctttgcttattcgttaagaagattcatggcttaatggatggtgtagactaaaaattatattaagagatcgagaataattcttggtctctttttttatgaggtgagttatgaaaatcgcagtaagcagtgaccttcatttagatttaaatcatgctgatgttgcagaaattattactcaacaggcgcattatttaacccgtcaagaaattgaccattacttttttgtgggggatgcctttaatgattttgcgcaaaccagcgtatattttgcggaactacaatcgcaattgcctatcacaaaggtccattatcttgccggtaaccacgatatgttagaaggagtcacttatgagcaattagaaaatttggatgatgatctatattttcataaccgatttatcgatattccccaaacaaactggcggattatcggtaacaatggttggtatgattattcgttttcaacgtatgaaagtaatgtaaaaggggtcgcaaaatggaagcgggcatattgggtggatcgtccaattatgcagccaatgaatgatccagaacgaatggcgattgttttacaccaagttgaagaaaacctaaaacaggctcgcaatcaacaaaaacaggttatctttatgacccacttcgcaccgattagagaagctctcccgcatccaattattgagtcagcacggcggcagcggatgtgggagatgacgacagcaatgttgggtagtagacacttaggagcattactcgctaaattcccggaagtaaaagcagttttctatgggcatcttcattatgctcaatcattaattactgttggaaatattgaataccgtaatcaagcagttggcgtaagacgcaaaaatagtgagaactggaaggggaaaagcctattagatcaatggattagctgcctttatactaaaaaaatctagttttttcaaaaaaataagaaaaaatacttgcaatgaggttggaaattaggtattataataaacgttgattgatacgaaatatttaatcaagcaacttcttggaggagtagcgaagtctggttaaacgcgacggtctgtaaaaccgttccttcgggttcggcggttcgaatccaccctcctccatctttattattgggctatagccaagcggtaaggcaacggtttttggtaccgtcatgcgctggttcgaatccagctagcccaactgttattgaaaggctaagaaaaacatctgtttttcttagccttttctagttcaaaattttattaagctatatgaaaaaaggaatgacagccaatgcctaaacaaggtcattttgcaaaaagcatgcgaactaaacaaataaatgattttaaagtgaaacgcaatgcgactggtgcgaccattgatgatgaacagttaacagatttcctagtggttcgctttgctttaacagctaagaagagggttcaatctggggctcgagaaactgctcaacggttcttgattgaaatttgtgattctttacaagaaaatgatggggatttacaggcgatcattccaaatttactagtgagtcttaatgcccgggtaccttggcaattctatccaaaaattctgggagagtgggatttgcttcaaaagtttttacaaaaagaacttcctgcagttccgttagaaaaacgtctacgaattaagcacccagtcacaacccaggaaatggagacgttaattgcaaaattattggtcagaaagattactgcaattacgtttattaatcagccgggagttgatccacataaaaaagatcagatggtgacaatgatgctgacaacgatctatcatgatcaaacgattgaatgggataaagtacggttgttactggcgccatttaagtttgaaattgcccctgaactagacgaagaaacgaaagactggttaaagaaattagcagaaaaataataacgttgactttcgttctgcttccttggtagaattaaatcgttattgcagagctgtggtggagtttttatcaccgtggctctttttattttgatttgaaggaggaagcgaaaagcaatggcagaaaaaaactattcacggatttatctcgcaattggttcccttgcattactaacgtttatcggaattttgaatgaaacatcgatgaacgtcacatatccagaactatctgctcagtttaatgtatcactcgatgttattcagtggattacaactggctatttattgatggtaacaattacgatggggacaactgcctatctattacgccaatatcaagcgcgttggttgcacttatttgcagtatcatttttcattattggtgacttgatgtgtgctttgactggtaattttcctattttgttaacggggagattgattcaagcgatggcaactgggttagcaaccccaatcatgttccatttaatttttacggagattccgcgtgaaagaattggcatgatgaccggaatggctgcaatggttatttcgtttgcaccagcactgggaccaacatatggtggggtcatttcagaaatgctgtcatggcggatgatcttttggattttactaccaattgttttgattagtcttgtatgtggtcaactttttattcgtaataaaccacttggaaatgataaagcatttagttatggaagcttgattacactggcaattgcccttattagtataattagtgcagtttcttcaattgggaaacaaggatttggcaagcagttttggcttttattattggtagcaattattttctttagcacctttatctatatcaataatcatggtaaatcagaattgtttgacttaaaggtgtttaagattttcccattgcggctatcaactgtcacttattttaatttacagtttattaatattggaatttcgcttgttattcctatttacgttcaatatgttttgcactcttcggcaattgtcgcgggtcttattttatttcccgggtcattaatcggtgcttttatctcgccatttgctggaactttggctgatcgttatggttttgctacgccagttatttccggggggattcttttggttattgggacaagttgcttcagtattttccaacgtcatttaacgccattactaataacgatcttctttgttattttgcgaattgggtttaactttgctttttctaatacaatttccaatgcttcaatgttggttcaaccgcaaaatgcccctgatgtaaactcaatttttaatatggtccaacaatttgccggctcactgggaactagtcttcttgcctccacaattgctttattccaaatgggcaacagcggttcactgatgggacgtacatatgctggaggacgatttgactttatcttattgggcgttttggcaatcattactttattaacaatggttactaactatcgcatgcaacaaaagaaggaaagtatttctcaataagtggttgaattagcctgacaagaatgtaataatgtggcttgattaatacaagttattacaggtttttaaagaaagtgactataagttaaaatgatacattctatcgttcactttatggtgagcaatcaggtttttacgctgtttatttgtcttgcaattggctttttgattggcaactataaaattgcgggtaaatttaatattggagcaacggtgggaacgttaattgtgaccctaatcgtggggcaaattgggagttttccccgggatgaaatgttgggaacgattttctttggcgccttcatgttctctgttggttatcggatcgggcctcagttattagttagtttgaaactatttgggattcgaattttaatcgctagtattttctggatggttgttgcattcttagttgggtggagtcttttttccgcctttaagattggaccagggatcgctgccggggttatttcgggagccctcacccagtcagctaccgttgccagttcgttgcaaacgattgggtcattgccagtcagtcaaagtgttagggcaacttatgaggctcaactcccagttgcctatgctttaacatatgtttttgggacattaggggtaattatctttttacgtgacctagcacctaaaattttggggatttcaattgctgaacagggtcctaaaatggctgaacattatcactttcatgctaaaaacccgaacccaacgtggcgacgaacatatcgcattgcaaatgattcaccgcttgtcggcaaaacgcttgaggaatttaatcgacggtctaattaccggattattgggttagctgcttttcatgatggcaaaatgactgaccaccttgaatatcaattgcaggctggcgacttgctaactgttattggttacgctgttcatttcgatcggttgatgcgagtaccaggattaacagaagtattgacgccaaccaatgcgccgcgtgaacgagcttttgttctgggaaaaaactttaaaccgggtgaattagcccttctacggcaacatggggtttttgtgaacattcaagacccaatcagtggaaaccaacaattgattaaccagttgcgaccaggggatgtgatttcattgactgggaatacatcacgaaccaaagcaatcttaaaaaagatgggacgctggaaagctgcagatacagcgatgaattattctttattctctttaggaatcggttgtgcttcccttttaggaattatcgggctaaaattaaatagtattccgttgcaactaggaaatggaacggcggctttaattatgggactaatcctgagttcatggattgagcgtcaccgtgaccgtaaatcaatccctgtaacggtaactagctttcttcagagttttggactaacgctttttgtggggacagttggtttacaatcagctcaagcatttacaagtgcaattaagtcgttagggatcggggtcttatttattggggcgatgatttcaataatgccacatttgctaacgctgttctttggacgctatatattgaagatggaacctcttgctttaattggtgcgttgactggttcaggaacgattgcagcggcaatgaatgagatttcgcaaaaagcagggccggaaggtggcgcatattatgcggctgcctttactccggcgtttgtagttggtaatattggaattacattactagggccgatttttgtggcgctactatcataatttatcgcttagaaagggcgtgcaaaattataatgcaacaattttttacaattttaggtggaatggggacgctggcaacagagagttatgtacgtctgttagataaaagaacgccaattcatcgtgatcaagattacttaaactatttagttgttaaccatgcaaccgttcctgatcgtactacatggattctcgatcatagtcaaccagatcctaatgaggccctgattgaagatattaaacagcaaagtcttttgaatcctgcattctttgttttaatttgtaatacagcccattactcttttgataagttacaggcagcaacggagattccaattctcaatatgctgcaagaaacggttaacgagatcaagaagattaagccggatgcaaagcgggttggtctattagccactaagggaactttggcagctaacctatatgatccttatattgagaaggctgggtacgaacttatcaagccaactcctgagattgccgatatgacagaagacctgatttaccatgatatcaaagaggctggtcattccgatggcaagaagtatcatgagctagtacggaaaatgattgaagaacaaggagcagatgtagtagttttgggttgtactgaattatcttttgcagaagagatggatcctgaaactaagtaccctgttgccgattcacaatcaattattgttgatcgctcccttgaacgagcattgaaattacgacaaaataataaaaattaaaaattagagaccagaaaggtaataattccaacggtctctaatttttattaattttttgccgatattttaagaaattggtctagatttttgggaatggtgtaaaatatacacatgcgcaatgtttagcaaacaatggcgtaaggaggaaagaaaatgagttcacctgtttatattcaaattcataatcggttaagacaaaacattgaagatggtgagtggaaagttggcgataaaattcccgctgaacgcgaactcgctaatgattttggcgtcagtcgaatgactttgcggcaagcaattcaagcattagttgatgaaggaattcttgaacgaagagttggctctggaacttttgtcgctaatcgcaaagtccaagaaaagatgtcaggaataacgagctttactgaattaatgcacgcgacagggaagaaagctgctagtaagacaatttcttaccacttgacgatcccttcgcaaacagaggttgaaaagctaaagttagccccagatgaacaggttttacgaatggaacgggttcgttatggaaatgatgtgccaatttgttatgaaatcgcaactgttcctgctaacctcgttcaaaaatttagcaaagaagaaattaccacgtctttttatcggacgctagaaaaaaaggcgaacctctatcctggtcatgcaacccagcatatttcagcaacgaaggcgacggaaaagattgctaattacttgcagattaagcgtggagatgctctcttgcgaatgacccaactatcttacttgcaagatggtcgtccttttgaatatgtccacactcaatatgttggatcacggtttgaatttgtctttgaaaagtaatcaagacaaatccatgttacaatactgattaacgatattacttttgagaggaattatactaatgaaatttgattatccggatgatagccttaccctgcatactgatgcgtatgaattgagtatgatgcagacctactggaaaaaaggaatgggtaaccgccgtgctgtctttgaggccttcttccgtaaaatgccatttaataatgggtacgctgtttttgccgggttagatcacattattcgctatgtaaaacaattacattttactgatagcgacattgaatacttaaagtctacgaatcaatttgatgatgactttctagaatatttacgtaactttaaatttacgggttcaatcaacagctttgaagaaggagatctggtatttaaccatgagcctattattcaagttgatgcgccgattattgagggccaattgattgaaacggcaatcttaaatattcttaattatcagattatgattgcgacaaaggcttcacggattaagtcaattgttggtaaccaaactgtaatggaatttggctcacgtcgggcacaagaattggatgcagctttgtggggaacgcgagcagcatatattggtggcttcgatgcaacaagtaatgtccgtgcaggtaaattatttggtatcccgatttcaggaacccatgcccatgctcttgtgcaggtatacatgaatgattatgacgcatttaaagcatatgcagaaactcatcataattgtgtctttcttgtggatacttttgataccttaaagagtggggttcctaacgcaattaaggttgctaaggaatttggcgataaaattaactttatcggtgtccgcattgacagtggtgatatggcctacctatctaaaaaagtacgcaaaatgttggatgatgctggtttcccagacgcaaaaatcatcgcatctaatggcttagatgaaaagacaattcaaaacttgcaaatgcaaggggcgaagattgatacatggggaatcgggactaagctaattactgcctatgaccaaccaactttaggggccgtatacaaattagtcgctattgaagatgaagatggccaacttgttgatacgattaagatctctaataatgttggtaaaatgtcaactcccggcaaaaaacaagtatggcggattaacgatcgtggagacggcaagagtgaaggggattatattacattagttgatgaggatcctcgtaatgaaaagtcactcaatatgttcaatcctaacttcccactccagcaaaaagacgtggaagattttactgcccggccaatgctaaagccaatctggcaagatggtaagtatgtttatgatgaaccgaccttagaggagagtcgtcaacaccgtttcgatagcttaaatgctttatgggatgaatataaacgcgatttaaacccagaagtatacccagtcgatttatcacagaaatgctatgataacaaacttaaattaattcaccaagttcatgaatatgttaaatcattgaataagtagaggtaatctgtagtgcgaaagtatcaagaagaaataattaatgcattaggcgttaactcgcaaattgatccccaagcagaagtaactaaacgtatccagttcatctgtgattttctccaaaccactaagatgaaggccctggtattaggaatttctggcggtcaagattcaagtttggcggggcggctttcacaattggcagtcgaaaaactgcgggaagagactggcgacaatgaataccaatttatcgcagtccggttgccatatggtgagcaagctgatgagtcagatgcaatgtttgcaattaatgacttcattaaacctgataaaataatgcgggttaatattaaggcggctactgatgcgatggtagtatccttaaacgaagccggtacgccaattagcgattttaataagggaaacattaaagcccgggaacgaatgattgttcaatatgctattggcggagaaaacaaaggagccgtagtgggaacagaccacgccgctgaagcagtaactggtttttatactaagtttggggatggtggtgcagatattacgccactttctggattggataagcgacaaggaaaagccttattacaatacttaggagcaccagcaaaactttatgataaaacaccaaccgcagacttggaagaagacaaaccaatgcgtcccgatgaagaagcgcttggtgttcgctatgatgaaatcgacgactacttagaaggtcgtgaagtttcgccagcagctgctgaaaaaattgaaggctggtatcgtcgaacccaacataagcgccacttgccgattgctccatatgatacttggtggaagtaaattgataataaaatgggaggctgggaatcaactcagtctctttactagttttaaggagaatgataatggaagaggaaacacttcagcttgttagcaaacaattgccagatattcgccctcaacaaattaaagcggccctcggattaatggatgagggaaatacgattccttttattgcccgttaccgtaaggaaatgacgggcacgcttgatgaagttcaattgcaagcgatccgggatgaatatcaccgggtaacgacattacgggaacgtcaagcaacagttatcaataaaattaaagagctcggtaagctaacaccggcgctcgaaaagcaaattaacagtgcaactgaattgcaagaagtagaagacctttacttgccatataagcaaaagcggcagacaaaggcccaacaagctcgtgaacatggcttggcaccgttagcaaattggctgctatcttatcccgatgatgatttaagtgcgaaggcgcaagagtttattaacgatgatgttcctgatgctgaaagtgcattaacaggcgcccatgaaattttggctgaagcaattagtgaaatggccacggtacgaagctggttgcgaaattatactgctcaacatggtcaattagagacaagcgtaaaacgtgatggtgaagaaaaggatgaactggggacttacaagcagtactatgagttcactagtccagttcagaaattgaattcttatcaaatcttggcttttaaccgcggagaaaaagaagggattattaacgtcaaaatcactttagctgaagaaccagtgatgaattaccttcgttttcgtttgattaaaactagcaagaaaaatgatgcgactgcctttattgaggaagcttacaaggatgcttacaagcgtttcttgggtccagcaattgaacgggaactgcggcgacaattaacagagggcgctgatgaacaagcgattaaggtctttggtgaaaatctctatcatttattgatgcaagcaccaatcaagggaaaagttgtattgggcttcgatcctgcctaccgaacaggctgtaaattggcggttcttgatgaaaatgggaagttcttaaccaaagcggttatttatccgcataagccagcgccagaaaagcaacgagccgcagcggaaggcgaatttattgatttgctagagaagtatcatgttgaaatgattgcgatcggtaacgggacagctagccgggaatcagaacaatttgttgcggaagctcttaaaaagatcaaacggccaatctattatgtcatcgtaaatgaagctggtgcctctgtttactctgcaagtaaggaagcgcgtgatgaatttcctgacttgcatgttgaacagcgaagtgcaattagtatcggtcgtcgtttgcaagatccacttgccgaattagtcaagattgatcctcaagcggttggggttggacaataccagcatgatttgccgaagaaagaattgagtggggaactggaaacgattgttgaacgggcggtaaaccgggttggcgttaacctcaatacagctagttaccaattgttgacgcggatttccgggcttaataaaacaattgctaaaaacattgttacctatcgagatgaaaatggccgctacacaaaccggacacagttaaagaaagtgccacggttaggacctaaagcttatcaacaatctgttggtttcttacggattattggtggcgaaaatccattagataacaccgatgttcacccagaaagttatcaggtggcggaaaagattattcaagcggcaggaattaatgtcgatgagttaggaacgccaagtgctgatgataagttaaagaaaattgatgttaagcagttcacggatgatcaagtcgggactgaaaccgttactgatattatttcttccttgcaaaagccaggccgtgacctgcgtgattcaatgcctgctccattattacgccatgatgtaatgacgattgaagaccttaagccggggatgaaacttcaaggaactgtccggaacgttgttgactttggagcctttgttgatatcggtgtcaaacatgatgggttagttcatgtttcaaagatgagtaagcagttcattcgtgatccgcgggcaatggtagccgttggtgatattgtggacgtgtggattgatgatgtcgacttgaagcgtcagcggattcaattaacgatgcttgaaccggagacagtcacaaatgactaatgcagaattacaacaattgaccgaacagtggtcgaaagaatactttgggcgcgaatttacgcacaaggtattttttaataagcggttaaaaacaactggtggacgctatcatttaagtgaccatcatattgatatcaacccgttaatgtatactgagtttgatcttcataatctgcgccaagtggtccttcatgaattgtgtcattatcatttacatctgttaggaatggattatcaccatcgcagtagagaatttaagactttactagcacaggtgggaggatcaagatatgcgccaccgactagtaaaagaaagataaattccaagaaaaaatggcattatatctgtactggttgtggtgttgaattcgcacgacaacggcgttttaacacccaaagatatatttgtcgacgatgtggtcacaaatttattttaaaaaattgaaaaaagttgttgccaacgaataggtatcttgctataataatattcgttggttgatatgcggccgtggcggaactggcagacgcgtaagattaaggatcttatggtcgattatgaccgtggaggttcaagtcctctcggccgcactacttaaaaggcactgagcaatatttgctcagtgccttttttgttttaaaatttttgttcaataaaatttacgtaaattttacctctcctcttgctatcccaatcatgaaagcgctatactttagatgttgtagatagtaatgaggagggatttattcatggatgcagatatcaaatggcttgatgaaccggaaacattccgggttaatcaattacctgcgcatagtgaccattattactacggcaactatgatgaatggcgtcataataatagtcgttttgcgcaaaacttggatggtcaatggcaatttaactttgctgaaaacccgcgtgaacgtgaagaagatttttataagacagattatgatagtagtagttttggaacaatcgaagtccctagtgagattgaactaaataattacgcccaaaataattacattaacactttgattccgtgggaaggtaagatttaccgtcgtcctgcatatgcccttagtcctgatgatgcgcaagagagatcatttagtgatggggatgataatactgttggcgaatacttaaaacgttttgaccttgatccttccttacggggaaagcaggttcgcatccggtttgacggtgtcgagcgtgctatgtatgtttggcttaatggtcactttattggttacgctgaagacagttttaccccctctgaatttgacctgactccttacattcaagatgaaggtaatgttttggctgtggaagttttcaagcatagtaccgcctcatggattgaagatcaagatatgttccgtttttctggaattttccggagtgtaaacctattagcccaaccacttgttcatgttgaagaccttaatattcggccaattgttactgataattatcaggacggtatttttaatgttgaccttcaacttcacggtgaaaagaccgggaacgttaatgtgcgggttatcgacaatgatggtaatacgctcgtcaatgaaacacaccctgttgactccacggtagaagttcgggatcaatttttagaaaatgttcacttatgggataaccatgatccttacctctatcaattgttgattgaaattcgtgatgacgaaggtaatttggtcgaactcgttccataccactttggttttcgtcgaattgaaattaataaagatcatgttgtcttattgaatggtcaacggctaattatcaatggtgttaaccgtcacgaatgggatgctaaacgtggccgtgcgatcacgatggatgatatgacgagtgatattcaaacctttaaggaaaataatattaatgccgttcggacgtgtcactatccagaccaaattccgtggtattacctttgtgatgataacggaatttacatgatggccgaaaataatctggaatcccacgctacctggcagaagatgggagcaattgaaccatcatataacgtccctggttcagttcctcaatggcgtgatgtagtagtagatcgggcacggactaactatgaaacatttaagaaccacccgtcgattttattctggtctttaggtaatgaatcatatgctggcgataatattgtcaaaatgaatgaattctataagaagcatgatgacagtcggcttgttcactatgagggtgtttgtcatactcctgaataccgtgatcggatctcagacgttgaaagctggatgtacttaccacctaaagaagttgaagagtacttgaagaacaatccagacaagccatttatggaatgtgagtacatgcatgatatggggaactctgatggtggaatgggttcgtacatttctttacttgataaatacccacaatactttggtggcttcatttgggactttattgatcaagccctccttgttaaggatccggtaagtgggcaagaagtgatgcgctatggtggtgatttcgatgatcgtcactcagattacgaattctcgggagatggcttgatgtttgctgatcggacaccaaagccagcaatgcaggaggtaagatactactatggcttacacaaataaattacgcgtgatatatggtgatgcgacattaggacttagtggtgacggctttcattatatttttagctatgagcgtggtggactagaatcgcttaagctaaacggtaaagaatggctatatcgtgaaccaatgccgacgttttggcgggcaaccactgataatgaccgaggaagcggctttaatattcggtctgctcagtggttagcagcggacacttttcataagtgtgttgcgattgacctgacagttgataatcaacactttgccgaattacctattgcgccgataaccaatgaatttagtgatccggtatctgctgagaatgtcaagattaagtatacttttgagacgctaacagttccggctacgcaagtcactgtaacttatgaggttaacggacaaggtgagattaaagtgacaatgcactactacggtcataaagacttacctggtctgccagtagtaggaatgcgttttatcatgccaaccgttgctaccggctttgactatcaaggattatccggtgaaacttacccggaccggatggcaggagcgactgagggtaccttccatgttgacggcttaccagttactaagtatctagtccctcaggaaaatggaatgcacatggatactcatgcattaacaattacccgcgattccacccaaaataatgctgatcattctcgggaaccatttagcttaactattaaacaagacgagcaaccatttgccttcagttgtttaccatatacagcggaggaattagaaaatgcaacacacatcgaagagctcccactcgcacgacgaactgttctcgttattgcggggaccgttcgaggtgttgggggaattgatagctggggagcagatgttgaagaacagtatcatattcctgccgaccgtgatgttgagttttcgtttgtattgaatacaaaataagaggttggattatattccatgccgctatgttcgtaaaaagttgtataacaaaggtctctaacacccggtaaatccgaacgttagagacctttttgttttaattaatttgtccagctgcaatcccttggaagtatttcttaatatgagtacagaaataataaaggccataaattgcaagtatgctaagaccaactaatgagatcactaataaggcggtgaaccatttagcttgcttaaagtagagggtaacggtatttttccctttacgttgctgaacgtaaggggcaccaaccgaggatcgctgatagtggcgaagtagatgagcattagccgttaattgtgattcatgatacgtaataattggcaaccgaacttttcccgcttttcctgcttcccatgataattgcaatcctccatgcggcaagacagtatgagtatatttatgggcttcattaataatttgcccttcgtaagcgtaagaacgaacatatttttgattcatgtacttcttagggatcggcaaatagtcaggacttctcttctcaaccatcgttaacaattgaccagggtaaagatcatgaacggaatgtcgcagtgcggccttattttcacttacgcgggtaatcgcgctaaaactattaagaacaatttctgagtcatagcgggctgcacgtttataaacatcaattgttgtaggagtaaagaccagaaaaaccattagcaagaggataccggtgattaattgatttcgtaagtcaatctcttgcgcttttttatcaagggttgtagcgctgatcccaactcctgcgagtaagaggggaaaggcaatgattgtcaatcggttaggaaactgtaaagtgtgtccaagtgcagggaccacatcttggaaaaaggaccaaggagtaagggaagaactaagcaggaggaccaaagaaccaagtaacgtcaggactgtattagtaagcgattttttgaaggtgaataatacgtaaatgagttgaaggataaagagaagccacattgcgtagattagataatcgcgtgtactgctaaacattgaaggcagtagcacattatcggcgaggctaaaatcggcaggatgggcaatattattatggaggttaagcattaataaggctccccaaacattagccgttaaaataatagttccgccgactgccttcagcgtttcgatccacattttcttacggttagtcgttataattaacccaataataaagaacggtgttagtgtaatcacaaaaaataaagaacttagcatatggatctgaatgataatcgtcatcagggtcatcaattgtagccagttgactggtcgttggtgatcctgaatcatacgtacgccgcaaattaccatataaggagccagagcagctccccaggcattcatgttctgtgctaattcccatcgtggaagccacccaatgttcatatagattagggcacagataattgcaaatgtccgtttactatgaacgcggatgctaagttgatacataccgattccacctaatagatagacgataaaggtagtgacgatctgatattgataccaagttcctactacgccgagaatagccccatttaaatatgcaaagagggggccataaacggcattgatgatgcgaccactttgttgaaaactataattactttgaaaatagctaaaattaagctgttgaatttgcttagctgcatcgtaaaaacggttaaagtgaaaaatggagtccgtccctaaaataactccatgtgatacaaactgggggaacatgattaaataggccattgcagcgatggcacagtatggaagcccccaattaattagattagcaattttagatttcataaaattgagaattaaaccaaatcagtttaatttttcctttcctcaaatacttaccttaataattatacggcagaaaagtcgactgtaaaataaccttctgcagctagtttaattgttaagcactagtaaaatgcgctattataagcatagtggcaaaggggagtgaaaaaatggcagaattagtaattgtacgtcatgggcaaagtcaagctaaccgtgataatatttttactggctggactgatgttccgttgactcctaaaggaattgaacagggtgaattagtcggcaaggaattgctaagactgggtatccaatttagtgatgcgtatacgtcttacatggaacgggcaatcatgacgactaatattatcctagaagaaattaatcagttatatattcctgtccataaaacgtggcgactaaacgaacgtcattatggagcattgagtggccggaacaaagatgaagtgaagaaagagattggtgcagaacagcttcataaatggcggcgtggttttaaagatttaccaccacaattaaaagaacgtcagcatgatcaccgctatgatcgcttaggagttaagattccgcttagtgagagtttagaaatgacgctccaacgactcctcccatattggcaagaccatattgcgcctcgtttgattgatggacataatcagttaattgttgcccatggtagttctttgcgggcactaattaaatatttagatggtatttcagataacgatattgataaagtggaagttccaaatggcaagccaattttatatcgctttggtgatcaccttaatgtcattaaaaagacttttataacaatggatggtgaaattgatgacaatacacgaattagcaaataacccaacgttaagcggccaagtacgcttgattgaaaatattgtttatggtgcgatggatggtgaggcattacatatgtcgatcttagcaccgtggacgcaacgtttcccaaaacaatatcaaactgaacctcggccattgattgtctttgttcaaggaagctcgtggcgaaccccaaaaatgggagaagaaattccacaactggttcaatttgttcaggccggttatattgtagcgactgttcaacaccgtagttcaattgatggtcactcatttcctgcgtttttgcaagatgttaagacagccattcgtttcttacgggccaatgcgcaaaaatatgcaattgatccgcaacaggttgcaatttggggtacttcctctggagccaatgcggcaatgctagtcggcttaacgggtgatgatccgcgctataaagttgacctttatcaagacgaatcggatgcagtagatgcggtggttagttgttttgcaccaatggacgtggagaagacgtttgagtatgatgctaatgttccaggaaataagttactgcaatattgcttattggggcctgatgtatcaaagtggccagaaattgaaaagcaaatgagtcccctatatcaagtcaaagatgggcaaaactatccaccatttttattgttccacggagatgctgataaagttgttccatatgaacaaatggaaaaaatgtatatgcggttgaaggataatggaaattctgttgaagcgtaccgggttaagggtgcgaaccatgaacgagatttctggagtccaacaatttataacattgtgcagaagtttcttgacgatcaatttaaataaatttcaataattgtattgacaacttattttttataagttatgattttgacatactaagttaggaggaacacgtcatgtttaacaaacaattaattagcgctactgtttgttgttgtggatcgcgtcttatgcgacccacagtttggcgtgcttacttttagttgagtaactgctaacgtaatcgggaataaatgcataaggcgcaaattcaagtgagaagttcttgagtttgtgccttttttgtattcgtttttgcattctaaaggagatagatattatgaaattcaacacacaattaattcatggcggtaatagtgaagatccaaccactggtgcggtctcaacaccgatttaccgttcatcaacattccatcaacatgttcttggcggtgaacctaaatgggaatattctcgaacaggaaatccaacacgtgcatctcttgaaaaattaatcgcagagcttgaacatgggacagccggctttgcatttgcttctggatctgctgctattcatgctactttttctttattctctcaaggcgatcattttgtagttggtagtgatgtatacgggggaacattccggttaatcaacaaggtattaaaacgctttggccttgaatttactgttgttgacatgcaagaccttgaagcagtcgaaaatgcaattcaagataataccgttgcagtttattttgaaacgccaactaatccgctcttgcaaatcgctgatattaaagcaattgctgatatcgcaaaaaagcatggaataaagacaattgttgataatacctttgctaccccttataaccaacaaccgttaactcttggggcagatattgttgttcactccgcaaccaaatatttaggcggtcatagtgatgttgttgccggattagcagttactaacgatgatgaaattgctgaacaattagcgttcctgcaaaactcaatcggtagtacgcttggtcctgatgatagttggctattacaacggggaatgaaaactctcggtgcccggatgcgagctcaccaagaaaatgcgaatgaagttattaatttcctccaaaacgatgaccatattggaaaaatttattatccaggcttaaaagattttcctggtcatgagattgcggctaagcaaatgcggaactttggagcaatgatctcctttgaacttaaggatggtttagatgcgaaaaagtttgttgaaagtctacaattaattgatcttgccgaaagcttggggggaattgaaagtttgattgaagttccagctgtcatgactcatggatctattccccgggaaatacgattagaaaacggaattaaagatgagttgattcgtctttcagtgggaattgaggaccctgaagatattattgttgacttgcaacaagcacttaaaaaattagattaattatagaagaagggaaactgtgacttatgtgggaaattatcaagacatctttaccacaactcttagcagcgggatttaaatatacgattccgttagcgattatttcatttttctttggactgattattgcactagtaacagctttaattcgtctctctcgtcaacgtggcgcattcatgattcttaaatggattgctagtttttatgtttggctttttcggtcaacaccgctactggttcaattatttattgtattctttggactgccatatctgagaattaagggactcctgccgcatggaataaaattagaaccatttacagccggcattattacattttcacttaatactggtgcttatgcttcagaaacaattcgggcagcgatcagttcagttccaactgggcaatgggaagcaggcgcagctatcggaatgacgcggttgcaaatcttatggcgaattattttaccacaagccttaagagtagctttaccgcccttatcaaacagttttataagtttggtcaaggacacctcattggctgcttcaattacaattatggaaatgtttgctgttagtcaacagattgcggccgaaaactatcaaccattgcttatgtatactttggtagctatggtttatgcggtctttacgacaatcttatcttatttccaaggatatcttgagcgggtagtagaccgtcaagtaaatgcaaataataggtgagaaaaatgaaattaacaaatattaataaaagttttggtaataaaaatgtcttgaaaaataccacgttagagtttcctgaaggtaaaacaacagtaatggttggtccatctggatctggtaaatcaacaattctccgctcacttaacttactggtaatgccagagagcggccagtatgattttgatgatcatcatttggattttagtcaaaaagtaagcaataaagataagttggcaattcgtcaagaaacagggatggttttccaagactacaatctttttcctaataaaactgtccttggtaacattattgagggaccaacacaggttttgaaacagacaaaaaaggaagcaattgcaaatgcgaataatttacttgctaaagtgggcttagcagattacggggaagcctatccgaatgaattatctggtggacaggcacagcgggtagcgattgctcgggcattggcaatgtcaccaaagtatatcttacttgatgaaccaacttctgcccttgatccagaattagaacttagtgtgttgaaggttctattgcaattagctgaagaaaaacaatcaatggtaattgttactcataacatggcctttgcgaaacatgttgcggataagattatttttgtcgagaacggcgaaattttatataatggtactccggatgagttttttgctccagataatccaaataaacgaattaagaactttatcgcctcaatgacaatggaaaatttaaaataaaggaagtttagaataatgaaattttggaagaaagcactattaacaattgcagtcttaatggtcggtacctctgcaggaatcacaagtgtttcggctgcttcatcagctgttaattcagaattagttcataagggagaattgacaattggtcttgagggaacatactccccgtactcttaccgtaaaaataacaaattaactggctttgaagtagaccttggtaaagcagttgctaaaaagatgggcttaaaagctaactttgtaccaactaaatgggattcactaattgccggtcttggttcaggtaagtttgatgtagtaatgaacaatattacacagacaccagaacgagccaagcaatataatttctctactccatatatcaagtcacggtttgcattaattgttcctactgatagtaatatcaagagcttgaaggatattaaaggcaagaagattattgctggtacgggaactaataatgcgaatgtggttaaaaaatataaaggcagccttacaccaaatggcgattttgctagttccttagatatgatcaagcaaggtcgggctaccgggacggttaactcccgtgaagcttggtacgcttacagcaagaagaacagtactaagggtctcaagatgattgatgtttctagtgaacaagatccagctaagatttcagcactttttaacaagaaagatactgctattcaatcttcctacaacaaggcacttaaggaacttcaacaagatggaacagtcaagaagctatctgaaaagtacttcggtgcagatattactgaataattaaaaaagatctccaacgtctgtgtgttacagtgttagagatcttttttgaagggactgtgacataagttaggttacttccataaaatacgaacagcgcagtacaacaatggccttcagcgtccggcaaagtcgaacgctgaaggcctattgttgcttgcgggggctcgaaaacgaagtcacaagtgacttctgtcttgctcccttttcacaaattaatgttaaattattatgctaaagttcccattggatcccaaggcttaagaacgactgggctcttagcgtaatcacgtttaagatcttcgctaaggtacttcttattaataacgacttggtagcagtacttgtccatccaatcgtcactcataacgaagtaacctttatggccgaccttgttaccccatgagttttcaactttccacttggttggcttaccatctacaaggtcaacaccagtgataaccattgcgtgatccatcatgctttcaccataatcaagtgcttcagctttggtcatttcaagatcaacgtcaaatagtttgtcgtagtcataggtgttaagggccataatcccaagtttagtttctgaatatttaataacatctgaaccaaaccaaacactttcgccattctttaattgttcaatcgcaagctgcttgaattcatccattggtaggtttaagtgcttgatttcgcggccaccaacgacattaccaagcatatcgatggtgtaagtttggtggtacttcttatcagcagttggtgcttggatgattgaaatataatcatcaagattccagccaacatacttcttgaagaattcttgtggggtaaggttagtatcgcggtggaattcgttgtccttctttgtccgatattcgaagtcaaagtgactaaccggttcaccaaatgtgtaagcaagcatccggtaattctcgttcaacatcttccggcgcgtttcgttaattgcttcttcatttgcatgatcttcgttaatcatttttcgcaaaataacggcatcgtgacgaagcttgttgtttaagacttcatcaattccccgtgagttagaagagttaaatgattcgggcattgcggcttttggcataaccccatacttgctgataagggcgcaaagcatatcccattggccaccatcgttttgtggttcgttcattaaccatgaaacttttcggctgtcggtaggctttttagcagtcttaattacgttttggtagaagtaattagatttttcaaacttatcccagaagaactggtaggcttgggaaagttcaaaattatcaggtaagttaaatttttgctgcatatcatgacgcattgtgttcagtgctgcaaacatccaacaacgaccggattgtttttgatcagcaacgtcccccgtcttgaggtcaatagagaaatgaggagtattatcagcaattgaatgccaattaaagcttgcattccgtaccccgtttttggtaacagtattttctaagacactgctgttagggtgatgacggtagtttttatgaaaactagcgatatcttctttgttaattgaaaagctcatttgcaatatctcctttgaatagattgaattaacgggcgtgcaatacctttggaccttctggagtaccaacaattacgtcgttaactcgatttaagaataaaccagtttcgacaatcccaaccatgtggatcaattcatcggctaaggccttcggatcgtcaatttcgccaaggtgaaggtcaataatatagttattttcatcagtacggaactttttatctccgtccatccgccaagttggcttgtagcctttcttttcaagaaggtcaaagacatgttgggaaccaaatgggattacttcaaccggaagagggaaagcaccaagtttatggacgagtttgctttcgtcgacaatccacattactttatttgaggcattggcaacgatcttttcccaaagaagggcaccaccgccacctttgataccttggaagtcatcactgatttcatcggccccgtcaatagttaaatcgatgtggtcaacgtcatcaatatctttaattgtaattccgaggtcgcgtgcttgcttagcagttcggtttgaagtcgttacaccgatgatatctttgattttaccttcttggacttgcttaccaagctcatcaaccatatatttaacggttgatccagttccaagaccgacaatcatcccagatttaatgtacttaactgattccttacctgtttgttcttttaatgcattttgatccattaatattccccctaattaaagcgatctgcaactggcaatagttgctgatattctggatgtagtttgaattgcgctaccgcatatggacacatgagcttgacaatgtattgttcttttgttgcataatccacaaattgacgtactaattcagctgcaattccttgcccacggtaagttggttgcacaaaaacgcgttcaacgacaacgtgatcatttgtatctggaacttttggaaaactgatctcgccaactaaaggttcttgatcgtcaaaagcaatgatccgctgaccatcaactcgatattgcatataaacacatcctttcataataattttcgataaactgcttttaaaagtcaagttatcaaagcgataccattaatttattatctagcatataatagtatactggaattattaagaataaaacactatgaggtgaacgtaatgaaacgtggatttaagattgtttctagtaagaaaggccaagatatacatttaccccaacggcaaacaactcgggcggccggatatgattttgaggcatcagaagattttattctgccatcaatttggaaaggcaatttcttgaaggcgctatggcaaatccatcaacaaaaaaagctaattgatgaagaatttaaggctgctgattcctgcttaaagccatacttagtacccaccggcatcaaagcctatatgcaacctgatgaatttcttttattagctaaccgatcaagtggtccttttaaacgccgcttgattctaccaaatggaatcggcattgtggatgcagattattatgataatgatagtaatgaaggtgaaatcttcttccaacttattaactatgggctgcgggattatcatataaaaaagggagaacggatcggtcaggggatttttatgccatatttaatcgctgatggtgaagaacaaccaaccgctaaacggactggtggattcggttcaacaaaagaataaataaacttagagaggaattaaagcgatggcaaaaattcgaacacaatatgtttgccaaaactgtggttacaactcaccacgctacttaggccggtgtccaaattgtggtgagtggaatactttagtggaagaacaggtagagaccagttctgcaccaaccaaaaaagcaactaccaccttaaccggcttagttgccaaaccacagaaaattaatgagattgatagtacagagactccccgtgttaaaacaaaattgaatgagttaaatcgcgttttaggtggaggaatcgttcccggatcactaattctaattggtggggatcctggaatcgggaaatccaccctccttttacaagtttctggacaattaagtgatgagcatcaccgggttttatatgtgtctggagaagaaagtgggacacaaattaaaatgcgggcggaacggttgaaagttgctggggatgacttttatgtatatccagaaacgaatatggatagtattcgggatactattcgtgacctcaagccagagtatgtcgtgattgactcggtacaaacgatgcaggcgactgatgtaagttcagcaattggtagtgtatcgcaaattcgtgaagttaccgcccagttaatgcagattgctaaaagtaataacattacgatttttgtcgttggacatgtgacaaagggcggtgcaatcgctggtccaaagatcttggagcacatggttgatacagtcttgtattttgaaggagacctgcaccatacatatcgtattttgcgatcagtgaaaaatcgatttggttcaactaacgagcttggtatttttgaaatgcatacaaatgggctgacggaagtaaaaaatccatcagaaatctttttagaggaacgattacatgatgcaaccggttcagcggtggttgtttcattagaaggaacgcgaccaattttggttgaaattcaagcgctggtaacaccgaccgtttatgggaatgcacagcgaactgctaccggtttgagccgaaaccgagtatcattgataatggcggtattagagaaacgtgctaacctaatgcttcaaaatcaagatgcttacttaaaagcagctgggggcgttaagttagatgagccagcaattgatttggcaattgcagtaagtattgcctccaattatcgggataaaggaaccaagcccaccgatgcatttgtcggtgaagtaggtttgactggggaaattcgccgggtaaaccgcattgaacagcgggttgctgaagcagaaaaacttggctttaaacgaatctttattcccaaaaataatttaaagggttggaaaccatcaactaatattcaagtagtcggtgtctcaacgcttaaagaggcgttatatttagcgctggggtaaaataaataattgaaaggatgaagcaaatgcggcgtagaatgattactctcatttatattctagttggcgcggcagtgggattttactatttgccattattatgggggattttgaacatcgctcttaatccggcattattagtatttatcgacattattattggtgcacttattttctggctattatccctcccattggttagcggcactgaaaagttgatccagcgaatcgaaaaagaactaaccaagcgtagtcctgtataccttttctttgggactttattaacgattattggcttagttttagcagttcttatttcgattccattgtggagaacgaggattccggtaattaataatattctgccgatccttctaatgattgtctttagttattttggttttcgaattggtacgacgcggttagatgattggcgtaaagcatttacccatgccaaaagtagtaaaaccgatggtggtaatgtgattgaacggcaagatgataattatcaccattataaaatcctagatacaaatattctgattgatggacgcatttatgatttagtcaaaacgggttttctagagggaacattactggttcctaactttgttttatatgaattgcaatatatcgctgattctggcgaaagtattaagcgtgttcgtgggcgccgtggccttgatattttaaacaagttacggaaagaaaaaattgttccaatcgaaatgtatgatggagactttgaagatattccagaggttgatagtaaattaattgccctcgctaaagaagtcaatggggtaattgtgacaaatgattataaccttaataaagtaattcaattccaaaatgttcaagtattgaatattaataacttagcgaaatcattacgaccacgagttattccgggcgaaacgatgacggttgttgttgtgaaaaaaggaactgaacgacaacagggtgttgcttatcttgacgatggaacgatggtggttgttgaagatgggcgttactttatggataaacaaattgaagttgaagtaactagtgctcttcaaacagacgctggtcgaatgatctttgctcgtccgcttcattcacaacgaggaattgacgagcatacggatacggaacataaagaaaaccgaaataataaagataagaaaaaataacaaagaatggctgtgaagaagaaatagagttttcttgcttccggctattttttaaaataaaaaaagaagcagctcgggaaaaagctgcttcttagggagtattacgataatcttgggggagatttcgtaaaaaagaaaatatttttttcggttactattgggaggagtaattgaaaaataataggtttcattgatgtagtaaagttcatctttactacgatatatataatagcagtagaatgtgaagaaagtatgaccaaatgttaaataattttttggatacaaattaatattatcagaaatgctattctaatacggaatgtggtaagattaactgtacaaattaattctttattaatgatttttaaggagcggatagacatgctaacaatttacaatacgttaacaagaaaaaaagaagaatttaagccattgcatccaggcgttgttaacatgtatgtctgtggtccgacggtttataattacattcatattggaaatgcgcgcagtgcgattgcctttgatacagtccgacgttaccttgaattcaaagggtataaagtaaattatgtttctaactttacagacgttgacgataaaatgattaaggcggctgccgagcaagggattaccgttccacaattagcagagaagtatatcaatgcttttatggaagataccgcagcaattaatattgagccggctactcttcatccccgggcaacggaaaacattaccgagatcattaagttcgtgcaaggattagtagaaaaaggatatgcctaccctaaagatggggatgtttattatcgcgcacgaaagtttaaccactatggacagctttctggacaatcacttgatgatcttgaagttggggcaagtgaacatgttagtgcagatgaggttaataagaaggaagatccacttgattttgctttatggaaagcagctaagcccggcgaaattagttgggattcaccatggggaaaaggtcgtccaggatggcatatcgaatgttcagtgatgtctactaagtacttgggcaagacaattgatattcatgcagggggacaagaccttgaattccctcaccatgaaaatgagattgctcaaagtgaagcagaaacaggccaaaaatttgttcgttactggatgcataatggtttcgtaacaattggaaaagacaacgagaagatgagtaagtctctccataatttcattactgttcatgaaattatcaaggaagtagatcctcgggttttacgtttctttatggcgactactcaataccgacgtccaattcaatatagtcaggcaaacttaactgatgcgcaaaataatcttaatcatattcaaacagcctttgataacttgacttatcgtgaacaagatgccgataagggagaggttcaagaagtcactgatcggcttgatcaatttcatcaccaatttattacagcgatggatgatgacatcaatgtccaaaatgggattgctacagtctatgaattagttaaatatgcaaatgtttatgctcaacaagacagtgtgagcttaggtgctcttcatgcaatcaaaaaagaacttgttgaattgatgagtatttttggcgttaagcttgaagcaagtgacaatcaaattaatgatgaaaagatcaagcaattgattgaagaacgaaatgtagcacggaagaataaagattttgcgcgaagtgatgaaattcgagacaaccttaagaaacaaggaattattcttgaagatactcctcaaggaacgcgttacaaaaaggaatagaaaggatccttatggtacaagcagattatcgacaacttaatggaattgctttggcttatttaggggatgcagcttatgaggtttacattcgtcagcatcttttaaccaagggaattagtaagccaacgaaactacaacatattgctacccactatgtttcggcaaaagcacaggcggctcttattgacttgatgaaagaagacgagttactgtctgatgaagaatggtcgtattttaaacgtgggcgaaatgctaacagtcatactcacgctaagaatacatcagttatgacttatcggatttctaccggatttgaagcggtaatgggttacctcaaattagctggtaaagaagagcgattggctgaattagcgcaatggtgtatcgaacaagtagaagcggggcgaacagcacatgaaaaatgagaatacggattttattattggccgacatccagctgtgatggcactaaaatctgaccaagagatcaataaagtttttattcagtcggggttaaaggccgatgctatttcccagattgttaaattagcgaaggaacgccacttagtagtatcgaatgttcctaagaataaattggacttgatgactgaccgacaaaatcaccagggggttgtgttagctgtagcagcataccaatatgcaactattgatgacctctttgataacgcggctaagcatgacgaagatccatttttccttattcttgatgaactagaggatccgcataatttaggttcaatcatgcgaactgctgatgccgctggtgttcatggtattattattccacgccggcgagcagtaggattaacttcagtggttgccaaaacatctacgggagcaattgaacatgtaccagttgcccgagtaacaaacctggttcaaactgctaaagaattgcaagaacgcggtgtttggctgtttggtactgatatgaaaggaaaagattaccgaacatgggatgcgcatggtgccgtcgctttggttatcggcaatgaaggtaaaggaatttcatccttgctaaagaaaacttgtgatgaaatgctaacaattccaatggttgggcatgttcaaagtttaaatgcgagtgtggcggcaagtttgttgatctaccaaggctttaactctcgtcatcctttaaaataattttgattttattgcttttaaaccttgattcgtgctaacctaagtactgtgtggaggtgataagtatgtcccagaaaaaagtagcattggaatgtacaaagtgcggtgcgcgtaattatacgattaccgctaaccctcaacgacaagaacgattagaattacgtaagttctgtaaacattgcggtgagtatactattcatcgtgaaagcagatagtggaggaaaatatgcacttaattcgatttattaagagtgttaaccacgaaatgaagctagttgtatggccaacagctaaagagaatcgtcgtgatacgactattgttgtttcattgactctgttcttcgtactattctttgctctgtttgattggttaattcaattaatgatgaaactctttgtttaacattagtagtcaaatagaaattagtttgttatactaaatctaagggaacttcgtagctattacgaagttttttattttactgaaaaatgatttgaattatgataggaggattcatcgtggaatcacatgaaaaacgttggtatgtgctccatacctactctggttacgaaaaccgggttaaaagtaacttggaatcacgggctcaatcaatgggaatggaagactacatttttcgcgtagttgttcctgaagaagaagttcgccaggttaaggacggtcaagcaaaagaaacaattgaaaagacattcccaggctatgttttggttgaaatggtaatgactgaccaagcttggtacattgctcgtaatactcccggcgtaactggtttcttaggatctcacggtggtggttccaaaccaaccccattgcttcctgaagaagttgatcggattatgaaacggatgggaaccgaaacaactgttagtgacattgatgttaaggaaggcgatactgtaaaagttattgcgggatcctttgcaaatatgactgccaaggttgtagaagttgatcacgaaaagcaaaagattaaggcgactgttgaaatgttcggtcgtgaaacggctgctgaattaggctttgatcagattgatacattttagttaatttaatattttgaaaattgttgaaataaattgagaattgtggtatgttttctaagtatgctattaacatactgtgggagaggtaaaacttactgcctcatcatgaccacaacacggactaaggaggttttgtctcgtggcaaagaaagtagctaacattgtcaagttgcaaattcctgccggtgccgctacaccagctccaccagtaggtcctgcacttggacaagcaggtattaatattatgggcttcactaaggaattcaacgcacggactgcagaccaaaagggtatgttgatcccagttgtaattactgtatatgaggaccgttcattcgacttcattactaagacgccacctgctgctgtcttactaaagaaggccgctggtgttgaacatggttccggtgaacctaacacaaaaaaggttgcttcagtaacgaaggaccaagttaaggaaatcgctgaaactaagatgcaagatctaaacgcagctgacgtagaagcagctatgcgcatgattgaaggtactgctcgtagcatgggcttcactgttgaagactaattactagcagtcgggatgcgctatgaaaatagtgcacccacgtgggaggtataactccgttagaccacatttgcaaggaggaaaacacaagatggctaaaaaacgtggtaagaagtaccaagacgcgctcaagaaagttgacagcaagaaagaatacgctgttaaagacgctgtccaattagtaaaagatattgcctacgctaacttcgactctactatcgaagtagcatttaacttaaacgttgatacaaagcaagctgaccaacaattacgtggtgccgttgttttaccaaacggtactggtaaggatcaaacagttattgttttcgctaatggtgaaaatgctaaggctgctcaagaagctggtgctgactttgttggcgacgatgatttagtagaaaagattcaagacggttggcttgactttgatgttgcaatcgcaacaccagacatgatgcctaaagtaggtcgtttaggacgtgtccttggacctaagggcttaatgccaaaccctaagactggtactgttacgatggatgtagccaaggctgtttctgatgccaaggctggtcaagtaacttaccggactgaccgtgatggtaacgttgctgtaccattcggtaaggtttcatttgatactgacaagttagttgaaaacttggctactttagaagacattgtagctaaggctcgtccagcttcagtacgtggaacatacatcaagcacgcttccatttcttcaacatttggaccaagtgttacgcttgatttaactacattttaatttaaattagttaaaatgaaaaaagactttgagatttttgctcaaagtctttttttgtttcaatttttacttcacaatagagatttgttgtgctatattattaatcaatgataaaaagattaaaaaataattagattttatcatttgagtttaaaattaattaaggagtgacgacaatgacacaatttaaatattcaaagcgtgttccagcagatggtacggatgcggttggtgcaattttacaagcagcggcggatcctaagattatttcatttgctgggggattgccggcacccgaattgtttcctgttaaagaaatgaaagcagctgttgataaggtttttgaagaacacggtcaagaagcgatgcagtatggggcagcgaagggagttacagctttacgtgaagttatccaacaacatgtaaagaaaaaagaaaatgtggattccgaattagacaatgttttagtaacaacgggatcagaacaagccttagatttagtgggcaaggcatttgttgacccgggtgatactgtattagttgaacagccaacgtacctctgtgctttagatgtttttcgttcttacggtgctaattttgcgagtgttgagatggacgaagatgggatgaagatggatgctttagaagaagcactaaaggctaatccaaatactaagctcatctatactgtgccaaacttccaaaatccaactggacgaacaatgactgaagaacgacgaaagcagttagctgaattagcagaaaaatacgatgtatatgtactagaagataatccatatggtgaaattcgttttgctggtcaacatgtaccagcagttaagtcatttgataaatcaggtcatgtcctttacatgagtacattctcaaagacgttagccccaggatttcgtctaggatggttggttgctgataaaaatgtagttaataaattgacggttcttaagcaatcagctgatctccatacagataacttagctcaattcgcggttgcccaattctttgccgataacgatgtggatgcccacgttaaagaaattagtgctttatacggcaaacgtaaagatttgatgcttgagggaattaaaaagtatttcccagaaggagttaaatatacggatcctgaaggtggcatgttcttgtgggtagaagttcctggtgttgatgatacagtagagttatttaaggaatgtcttgaacatgatgtagcctttgttccaggtgatccgttctttgccgatggagttcaacctggtgctttccgtttgaactattcaaatatgaaagaagaccagatcgaagttggtttgaaacgtttaggagcggccttaacagctgcagttaataagtaattatttcagccattaataaatacaatcctaataaaatttcgaatttaaatacttaagggagcgaggcagaagagctctcgtaaacaataataggcctctatcgcttgaaattaccaggcgttagaggcctttatattgcactatttgtcttatgtggacgtaatctgacatatgtccattccttttttagtcattaaaatgtagtaggttaatatactccctctgtactttgagttaattgtgattataattatattaattgctgaaaagttttaaatattcgggtttcttgctatctaattgggatagtaataagcattatcaaaaatttttaagggaaaaggagtttttgatagtgtcaatgatagatttcactaatacagaaatggcagtagccgttatctttactttaataataatgtttgtaatatcctttgcagttagttttttattttggttgatttaccaccaaaatatgaaaaaaggataattagagatgataattataatttttacgcttatttgggggatcgcgctgtttatatttttagtttattcattgattagtctgctatttcggatgatttcgtatcctcgggactttcattacttcgcgggaaaccaacaaccagctaaaattgactacaatttacaatattataatattatgttattgttccatgttttaatgaggcagcagttattcaacgaacaatcaaatgtttgttgcgatttaagcaatttgaaatagtggtagtagacgatgctagtagtgacaattcagttagtcagattactaactcgcatatccaccttttgcgacggcatcttcctaatgcccatacaggcaagggggatgtattgaattttgccctagattatatttgtcagatcactatccgacagagggtttcttttgaaaaggttattattggcgtagtggatgcggatgcccaattagttgataatgccctacagcgattaaatgcctatttttcctcaccaaggacgaatattacccaaatgcgagttaaaatgtatccacattttaaaaattggttgcagattttacaagatattgagttttttagtattaactatatggcccaaattatgcgaatgtatactaaaacagttggtttaagtgggaatggccagttctttcgacttaaaccaactattgataaaattagtgcgcatccatggggtaatgcgctcttagatgattacgaactaacgataaaaatgatgctgaaaaaattgcatgttgattatatgacagatacatatgtttaccaggaagcgttaacgtcccctaaaagatttgttcgacaacgaagccggtgggtacaaggcgatttaaattgtcttaagtatcttcccgagattattaaaagccgcattttaagcaggacacagaaacttggtatatattatttcctgcttcaaccatggcttgattttcttgcagacgttgcgattattattttaacgacgattgcccttactcattggtacaatttttatggccacttgactcttttgactttttcattagtgatggccggcttggtagtcttttcgttattttggagaataatatttggaatattttactatcgtgacttagctcactatcacgaacctcctttaaaaaaaacaccaattggccttattaccgcttggaatttcctatatgtatgttatcttatttttagtattataatggcttattggcggtggagttttcgccaaaattcgtggataaaaacggaacatggaaaaatgtttcttgaatagcggggagatatgatgagaaagattaaagtaatgacggtatttggaactcggccagagggaatcaaaatgaggccagtagtcaaggccttggagcaggatgatcgcttttcatcggtagttgtttcgaccggtcagcatgctgaaatgcttcaacaggttttagctgtttttaaaataacacctgattatgatttgaaaataatgcgtcctggacaaactttaacggaaattacaattgaaacgatgacgaagcttgaaccgattattcaaaaagagcaaccagatattgtgctagttcatggcgatactagttcagcctatgcatcagctttggttgccttttataatcgggttgctattggtcatgtcgaagctggtttgcgaacctgggataaatattcgccttatccagaagagatgaaccggcaaatgattgatgatcttgctgatttatattttgctcccacccaaacaagtgctaacaatctcaaaatgggaaatcatcagcatgggattatagtgacgggaaatactgccattgatgctttgcagtatacgattgaccattcgtatcatcaccaagtattagacgaaattgatcccgacaagaagattattttacttactatgcatcggcgagaaaattggggtaaaccgatggaagaaacctttaaggcgattaaagagattgtggatcaacggaatgatattgacgttatttacccggttcatctgaatcctaaagttcaagcggttgctaataaaatttttggaaacgataatcattttcatttgatttccccattagatgttgttgattttcataatattatgagtaagtctttacttgtgatgagtgattcgggtggggttcaagaggaagcaccagcacttcataaaccagttctagttttgcgtgatactacagagcggccggaaggagtaactgctggaactcttaagttaatcggtacgcaacttaataatgtaatgaaagagttatcgtccctattaaatagtcctgaagaatataataagatgagtgaggcacagaatccttatggggatgggcatgcaagcgaacgaattatagatgctattgctaaatgggcagcaactcaaaaagaattataaaaagtccctttacagaacttcagagaatatgttaaactgtaacagttgattaaatatgactctgcctaagactcaggtggcgaaagccttaatcaaatgcctgccgaggaagaaatgaaagttccttctctatgtctgcggtcatagggatttttttataaatccgatcaaaaaaacattgcaggaggtgaaaattcatgagtgaagcagctattgctaagaaagctgaaatcgttaagcaaactactgatatgcttaacgcagctcaaagtgctatcgttgtagattaccgtggtttaactgttgcggaagttactgacttacgtaagcaacttcgtgatgctggtatccaaatgtcagttatcaagaacaagattcttgatcgtgctgttgaaggtactgactacgaagatcttcgttctacttttgttggaccaactgctgttgccttctctgacgaagacccaattgctccagctaagatcttgaagaagttcgctgatgaccacgacgctcttgaaatcaagggtggtttcatcgaaaagagtgttaagactcttgacgaaatcaacgaatacgcaaatatgccaggtcgcgaagaactgttgtcaatgcttgcatctgcattgcaagatccaatgcggaagattgctcgcgcagtcaaggctattgccgacaaggaagacaaagccgcataattgccgtatatcaatacaatataaaattaaaattaattacctaaatattggaggaaataaacatggcttttgataaggatgctatcattgcttcattaaaggaagcatcaatctctgaccttaacgacttagttaaggctatcgaagaagaattcgacgtttctgctgctgctccagttgcagttgcaggtgctgctggtggcgacgctgctgctaaggacagcttcactgtagaattaactgaaccaggttcagctaaggttaaggttattaaggctgttaaggacattactggtcttggtcttaaggacgctaaggaccttgttgatggtgctccatcagctatcaaggaagacgttaaggaagacgaagctaacgacatcaaggaaaagcttgaagccgccggtgctactgttacccttaagtagtcttaaattattaaataaaaaagagttacgaaaatattgttttcgtaactcttttttatttcagggataccatatgaggtgttcttttgtaatacgaaaatagctcccaccatttattctaaataaggagctattttatgatgtgtgcaaaattttagaagaacaggaaagttaaaagtaaataaatctactttgcaggatgagtagtactatcattgcttgtgcggtaaccaaagtagaattgaatagcagcaatagcgatgttaacccagttcatagcaataaaccaaccgttaattgcgcttgcatcatgagatacaccataataaacccaaaaaccgataacaattgcacaaatattgatccaagcgaaagtcttttgtagaatttgattattaagttggaaccacatccaaatgacattaatgacaaaacaaattgccaagatccaaaaaataacattaaataacataagatatccctccttagggcctcgataaacattaataaacgcgtattgaactgatgaatagcaacattcgaaaaaagtattacgcggtgtggttagcagttgaagttatttacaatgattggtaatactttactaattttgggaaagttgttgcttagcatcttcatacccgtcaacatagtcacgaagagcatgcatcttacctttaataaacttattggtgacattaataattcgttgtggatacttcctgaaaggttctagagccttataatccttaactacttgatcataacctttttggtatgcatttgttgcaccattttggctatttgacgtaggacaatttttttgaacatctttatcacctcttttgttgtcctaccatgatagtaacaagtatacaaactcaattccaatgatatggtataaaaattaaaatattatgcattaataaaaatactggttagaaacttttaaccagcatttttattaatctttattctttttcagaagttcagtaatttctttgaggtacataacttcttcgctaggagtatcttttttgttatcttcttttttgcggaatgtattgattgcttttaccattaagaaaacaacaaaggagataatcaggaagttaatgactgcatttaggaaacttccgtatttaaactgagcatcgccgaccgtcaaaacaagattagataggtcaattcgaccaatgaataaaccaataagggggttaataaggttattaactaatgattttacgattgaggtaaaagctgcaccaacaattatcccaactgccatgtcaataacgttaccacgagcaatgaatgttttgaattcttttaacataaaatagacctccttctagctctagaggggaacaacttcaattatgattatatcaaacagaattaaatgcttagggcttttatgagatgacataaggagatttaatttatttttaaataataattgcatattatatcaaaccattatattatatgacatataatattacagctaaaaaggagggatagaatgaagattcaaattacagctgacttactcgatgggatggtcttagcaattcttgaacacaaagattactatgggtatgccttaactcagcgaatgcaatcagctattaccatttccgaatcaacaatgtatcccgttttacgccggttaaaaaaagacggttatttaataacttatgatcagccttaccaggggcgaaatcgccgttattatcaaattacggaagccggcaaggagcatttacaacgtattcgtaagttatggactgattataaaaatagtttagatggtattttttatgggttaggtgagggagaagataaagatgaatgaacgtcaaaaatacattaatgatttatcaatatatttaagacaattaactgatgaggaacgaaatgatgccttagaattttatgatgaatatattgccgatgctgggctggagacccgaacagcgattgaagaaaggttaggaacgccacgacagttaagtcataagatattagccgattattccattaaagctaataatgagtcgatcaaagaaggacaccctgcttcgcctcattctagttggcgtgtcttttggtgggtgctagtagcaattattacttccccaataacgtttgggctaggaattgccgtattggcactattgttggcagcagggggagtcgccttaagtttgattgttggaatagttgctttaatttttggggttgctgccatagcgatcgtatctatttatattggaattggtttaattgcaacaaacctgtttagcggactattttattttggcttaggattgacactgatcggcttattccttgtttgtttacctttaatttactggttaatcagagttattgttcaagggattgcgaactttgctaagttcatttatgcaaaagtgcaggcaaggaggaaaaagtaaatgaaaaaagtatttaaggtgggagtaattgttttaatcttaggagtaatcctcctcggaataggcttctttaataatggtaacaaggctgtttattttgagaacaatcgtccagcaatttttcattctcacactaaaacaataagtactaataaagcttttgaacggattgatatctcagcatcgacagctaatgtaatagttcgtgaaggcaaaaaatatcaaattacttattctggtataagcaagcattctccggccgtaactgttcataataacgttgcttcaattcgccaaactggtggctttccgcttgtctttaactttaatgattatcagccccaccaagatttaatcattgtgactatcccacatgatcaagccatagctggtcgtattcatttagagagtggtgatctaacagtttctcaagttaaaatggacaatattgatgttaacagtgatgcaggcgaggttgaataccgtcaagttacattacgtggaggaagtacaaaactctcgtcaggtaacttcacaggacatgatttaacagttcaaggacaatatactgttaataatcaatctggtgataatacggtcacaaacacaactgttgatggctacttcctaaagactgatgcaggtgataatgaacttaatggtgaagataagggtgaagaacccttacatcagaatgatgatgcagaaaatgtgctccgcttgataacgcaatctggtgataatgaagtgaattaaggtaactaagattaataaaagcccctcgatatctagaaattagatgtcgaggggctttttaataggagaaaagtcttaatttttaattatgcgctggattatttttcttcaacgccagtaccatcgtagcaacgttcaagtaattccttgagttggctaacaagtggttcaactgggttagtagtagtacattgatcttcgtaagctaagcgagcaagatcgtcaactactttatcaaattcttcacgtgtaacgccattgtccttaagactaagcttaacaccacattcgtgagcaagttcgataactttcttagcatatgcttcagctaattcttcatcagtgttgcctttcaaaccaatgaaccgtgcaatgtcagcgtagtccttagttgcatggtaagtctcatagtgaggccagagagcaagcttttgtggacgttttgcgttaaagcgaattacttgtggcattgcaatagcgataagcaaaccgtgaggaagaccgaatgctccacccatcttgtgggcaagagagtggttaattcctaagaaggcttgaccaaatgccataccggccattgttgagaagtcgtgcatcttacgacgagctaacttgtcaccttgaactgacttaggaaggttttccataacacccttgatggtttgtagtgaccaaccacgagtgtaatcagttgccataacagaaacatatgattcagtagcgtgacataaaacatctagtccagtccatgcagtagtttttgctgggacagtttcaacgaattgtgagtcaacaatcgcaatgtttggagttaaggcgtagtcagcaagtgggtacttaacatgagtttctgaatcggtaataaccgcaaatggagtaacctctgaaccagtacctgatgtagtaggaatcccaataagttgagacttagtaggcttcttgatttggtaagcacgcttccgaatatcaagatacttttgcataaccccataccatgaagtttctgggtgctcatagaacatccacatagccttggcagcatccattggtgaaccaccaccaagagcaataattgtatcaggtttgaagtcgttcatcatggcaacacctttttcaacagtgtttgttgatggatcttcttcaacgtcatcaaatactaagaaagcagtgttgttttgacgttgacgcaattgatcgataacacgttgaacgtaaccacgcttgctcattccaggaccagtaacgataaatgctcggttaatgtttggaatatcttgcaattcttttagtgagttgcgttgaaagtatacttttgggggaatcttaacccattgacggttttcacgccgctttgcaattgttttgatgtttaagagatcccaatcagtaacgttgtgagaaattgagttaccaccgtatgaaccggtacctaaagtaagtgatggtgtcatgttgttgtaaatgttaccaataccaccgataccagatggagagttaacaatgatccgtgaagcacgcatttcaagaccgtacttagttgctaaatcatcatcaagggtatgaatagcagcagtgtgaccttcaccaccatagtgtaataattgagcacaaatatcaaaggcattttcatgtgaagtagccttgtacattgttaatactggtgaaagcttttcagctgaaagtgggtacttgtcaccaaccccttcatattcagcgatgataaccttagtgttttcaggaactttaattccacacatattagcgatggcgttagctgaacgaccagcaattggtccacgaacttggtgacgcttaggatcaatgaagccttcagtgaacttatcaatttcatttggcttcaagaagtaacagttccatttttggaattcttcttttaccttgtcgtagatttcttcatcaacaacaactgagttttcagtagcacagatcattccgttatcaaaagtcttagaaagaacgatatcgtaaacagaacgttcaatattagcagtcttttcaatgtaagctggaccgttaccaggaccaacaccaagagcagggttacctgaactgtaggcagccttaactaatgaaggaccaccagttgctaaaatagtagcagtcttagggtgttgtaacaatgcacttgtattttcgcggctactttcaggaagccactgaatcatgttctttggtgcaccggccttttccgcagcttcttgtaaaatcttagctgttttaatggaagatttcatggcttgacggtggaatgagaagataattgtattccgcgtcttagcactaatgattgatttgaagatcgttgttgaagtagggttagtaactggaacgatacctgcaataataccaagcggatcagcaatagtgatggtttggttttcatcgttgtcttcgatgattccgacagtcttatcatgacggatgttgttccaaatgtattcacttgcgtagatgttcttgatagccttatcttcggcaaccccacgaccagtttcttcagctgcatcaatagctaagtccatgtggtgttcttcagcagctaaggccatggcttgacaaattttatcaacttgttcttgtgagtagtaacgtaattgttcaaaagctgcttcacttttggcaattatgtcattaactaatttttgcgcattttgctttttttcttcttcagttaatacgtttttttcaacttgttttttgttgttagcaggcataattgaaatctcctttttcaattcttttctttgttaacatttgaacatgtataatattactacatttttttgctttgtaaatacccttgtgaacatttaaacaatggttgctttgtatgaattcgcttacaatattgtcttcataatacttgtatagcaacaaaaaacattggtattatttttgagattaagagatgatagatttgtatactgttattaattgaagtctgtttcacaaatagaatataaaagcgaatatattaatttaactcggctagttattaagttaactaatcattaacagattattattgggaataataaaaaagccaccattcagaaatggtagcttttttattaatcgcgggcattaatgtcttttcccgcgtttggatctttaacgtcataatcactatcattcattgcttcaacggcacccatgcgatacccattgccgacttggctaaaaaaatcatggttagaagttgaagtagaaattccattcataacaactgggttaacatcagaagcggtatcagggaatagtggatcttgaccaaggttcatcaatgccttattagcgttgtaacggatgaaggttaaaacatcatctgtccaaccaacttgatcataaagaagatgagtgtatttttcttcattatcgtatagttcataaaggaaattgtacatccaatctttcatatcttgttgttgcttttctgttcgatcacgtaagccgacttggaacttgtatccaatatatgtcccgtgaactgattcgtcccgtaaaattagcttgataatttcagccacgttatttaatttattgtggccaaggtaataaaggggagtgtagaaaccagaatagaataagaaagtttcaaggaaaacattggctactttctttttgagcggatcttgacttggatcaaggtacatatttgcaattttgacagctttattttgcaaatattcttctgtatcggaccattcaaagatttctttgatttggtctggggtattaagagtagagaaaatagttgagtaactcttagcatgaactgattccataaattggatattattaagaactgctgtttcatgaggagttttaacatcttctttaagggcagttaatcctgcttctgattgaacagtatcaagaagggttaaaccaccaaaaacatgtccgacagtccattgatgatcgtcatctaattcacgccaatcatccatatcattggcaactgggatccgcgtatcaagccagaactgttctgttagcttttcccatgtagctttatcgatcatgtcggaaacttcattccaattaattgctttatattgatttacaggtttaaattcttccagtttcattgattgagctcctccaaatacgttgcttttaataaatcgagatgccaaaagccatttgtatacataatatcaagtttaccagtgcccaacgtttaaatcaaattctgattaggcttagataacacagctttcacattggtttgcaccaatttcatcgctatcgtcagtaaacgttcgaatgtagtaaattgacttaataccacgtttataggcatagtgccgtaagatgtttaaatcacgagtcgtcattttatctgttcgtccatttttccattcgtaaaggcctgctgggattgttgaccgcataaagagggtcattgaaagagactgatcgatgtgctgttgtgcagcggcgtaagtgtcaataacctttcgcatgtccatatcgtaagctgaacgatagtaaggcatcgtgtcgtttgaaagatatggggcagggtaataaattttaccgatcatcttttcttgacgctcttcaacacgattaatgattggatgtagactagcagtcgaatcgttaatgtaggaagttgaaccgtttggcgctacagcaagacggtattgattgtaaagaccatcttgcattacattttctttcaacttcttccaatcttcaattccagggataaaaataccttcaaaaagacctttaacaacatctgattgtggtccccaatccttagtgacatatttgttaaagtaggaaccatcagcatatttactgttctcaaaatcgtggaaagtttcctgccgctctttggcaatttcatttgatgccactaatgaccaataatttaagagcataaagtaaacacctgtgaattcaatcgcaaccgggcttccgtattgaatatggtgcttagcgaggtagctatgcaatcccattgcacccaaaccaactgaatgggcaagccgatttccgttttgaatagttgggacaacatctaggtcttctacgtcactgattcgggttaatccccgcatcattgccttaatcgatttaccaaagtcagggctttccatcatattagcaatattggttgacccaagattacaactgatatcaattcccatttcagaatatgattgatcatcatttacttgcgctggtacttgtacttgagcaatctctgaacataaattactcatcacaatttttccattaatcggattatcccggttttctgtatcaatattgataatgtaaggataacctgattcttgttgaagtttactgatttcgtcctccaagtcccgggcattaactttcttcttgcgaatatcatcgtttgctactaaattgtcgtattcttttgtgatatcgacgtaggagaatggcattccgtatactcgttcaacatcatagggactaaacaagtacatatcagcattttgctctactaattcgtaaaacttatcaggaaccgtaattccgagagagagggtctttaagcgaatcttttcatcagcgttttccttttttgctcctaagaattcaataatatcaggatggaaaacactaaggtaaacgactccagctccctgtcgctgtcccagttgattggaataggaaaaactatcttctaacaacttcattacaggaacaactccactagcagcaccttgtattttcttgattggggcaccagcttcacgaaggttgcttaaattaatcccaacaccaccaccaattttagaaagttggagggcagaattgattgttcgaccaatggtattcatgtcgtccgttgtttgaatcgcaaagcaagaaacaaattctccccggcgtttacgcccaacgttaaggaatgttggagttgcgggttgataacgttgatggatgatttcatcagcgagctgcattgctaactcttcatcaccattagcgaggtaaagagcattcattgcgactcgatcaatatagttttcaaggtagtactctttatcatttgttcgtaaggcatattgagcataaaacttataagctgccataaaagaatggaagtggaagttttgggcttttaaataatcgtaaagcttttcaatgaatgcttcactatatttattcataaattcctcttcaatataatcattttcttttaaccattgaaaacgttcttttaatgaagaaaagcttttggtattcggttctacattatttttgataaagtcttctaaggccaatttatctttatctagttgaatttgtccgttttttgggatatttacttcgttgttataatcgtaatatttaactttggtcatatcgatatcggataacgccatattaataactcactttctgaattaatttgattatgtcaataaagaagccagtacaccaatagcgaattgatgcctggcaaaatattagtttatttaaacttaggcaagttggtttaattgatcaggacgaaagccagaaaaagcttgaccgttaggaagttttacaactggagtcgccataaaaccttcagacttaagttgagatatgtattctggttgttcatcgatgttgtgttcaataaatgaaattttgtgttgctcaaggaaacgttttgtcatcttgcattggatacaattattttttgaaaatacagttaccatcttcacgaggcctcctaaacgattagtcgatgttttctagtataacgatgaattagaaaaaatcaattaaaaaagcactatatttcgtgcttgaaaaatagtgaaacacaacatatagtgcttgaactagtggttaacacctgtgaaactttttttgatagaatacttaagcaggtgcttaataaaattaatttgaaaaactaatctattattatacactgaacaacaggggaattttaagtgcttggagaaaaagaatgaaaaaaatcaattcatcattatctgaacaacaaaaatttatgaagatggcaattgcagaagcaaaacaagccagaattttagatgaagtaccaattggtgcgattgttgtccacgagggacaggtaattgggcgtggtcataatatgcgtgaaaagtttcaagatgttacctatcacgcagaaatgcttgcgattatggaagcatgcacgaatttaggaagttggcgtttagaggactgtgacttatatgttacgttagaaccgtgtatcatgtgtagcggtgccattatcaacgcacgaataaaaaatgtttattatggtgctgctgatccgaaagccggggcggttgatagcttataccatttactaaatgattcccgtttaaatcatcaagttaatgtccattctggtattttaggggatgagtgtagtcaaatgttaaaaaactttttccgtaaaattcgtcgccgccggaaagaggctcgacgaaaaaataaggctaacccctagtaatttaaagaaaaatagtgtattatactatttgccgtaaggccttagagcaagggtatgcttacgaaccgtgtcaggtctggaaggaagcagcactaagtatgatataccttgtgctctaagttttattgataattaagctgacccgtaatggtttattgcgggtcttttttatttttaaattttaattaaaatgtattttacctactttatgtgattaattccttgtataatattttatagtattttaaattcagaaagggagtctggcgatgagttatcaggcattatatcgtgtctggcgaccacagcgattcgatgatcttgtcggtcaacagattgttacaagaaccctaaaaaacgccattatcactcaccagataagccatgcatacttgttcgctggtccacgtggtactggtaaaacctcagcagcaaaaatttttgctaaagcggttaattgtcatcattccaaggatggcgaaccttgtaatgagtgtgagatttgtaaagcaattacaaacgggcaattaaatgatgtaattgaaatcgatgcggcttctaataatggggttgaagagattcgtgatattcgggataaggcaaaatatgctcctacccaagcggactacaaagtttatataattgatgaagttcacatgctttcaacaggggcttttaacgcactgctaaaaacgcttgaagaaccaccagccaatgtgatttttattcttgcaactacagaaccgcataaaattcctttaacaattatttcgcgggttcaacgatttgattttcgacgaatttcagcagaagatgcatttaatcgaatgaaatatattcttgatcaaaaggaagttacttatgatgaaaaagcattatgggtaattgcaaatgccgctgaaggaggaatgcgggatgcgttgagtatccttgaccaggttctttctttcagtgataatgaggtaaagttggatgatgctttactagttacaggaagtgttactaaacaattattaaaaaagtactttttggagattagtaagcatgaaggggcgactgctcttgacaccatgaaagatattttggatgaaggaaaagatggtcagcggttcattgaggacttgatttcctttattcgtgatattctgttataccaagaatcaccaagcttgattagtgttgaaagtacgggactaaagcaggaagactttgaagaaatagtccaacttgcttcttcagcgaccttataccaaatgatcgatgaactaaataatattcaagaagagatgcgttttacgacccatccggatgtgtatttggaagttcttacaataaaacttgcacaaatcgaaccacaaaagaatattcaatcggcaccagcggtttcttcggatacaaatactgaagctactaagacgattgaaaaattacaacaagagatacagcaattgcaacaaacagtaaaacagttgcagaatgcgccggcaaaggctagtcgaccatcacctcggcaacaaaatgagcaaccacgagtacaacaaaagaaagtgcaggttaatctcaataagatttacccagtgttagaaaatgcgactcgtcaagatttaataaatgttcgtgagctatggggagatatgttgaatctattgtcggtgccgcaacggtccttacttcacgtttcacaaccggttgccgctagtgccgtgggaataattgttgcttttgattatccgttcttattccaacaagcagctgatgatacaacgttgttagagaatatggaaagtgctctgcaacgtttaactggaaatgaacggcaagttgtttttgtacctaaggataaatggccaaaaattcggcaagactttatcaaggatcatggttttggtaagaatcagcaaaagtcgcaacctattaaacaaaagccgcaaactactgaagaaagcggacaaactcctgcagctacaccagcaccgatggaggaaccaccgctaccaccagaagatgagacactaactgaagaaaagtcacctcaagaagataaccaagtagcaacagcacagaagttatttggtagtgatattgttaaagtagaagataattaagaaaaaggatggatgatattatgatgcgtggaatgaatatgcaacaaatgatgaagcaggctaaggcaatgcaaaagaaaatgatggctgaacatgaagaacttgctaaacaggaatttgttggaaaagcaccggatgatatggtaactgctacgtttagcggggataatcaattaattgacttaaagattaagccagaagcagttgatccagatgatattgatatgcttcaagacttggtaattgctgctgtgaaagacggaatgaaacaagtcaatgatgctactcaacaaaagcttggtaaatatacgcaaggtatggggttgtaaaaagtgatccaatatccagaaccattagcaaaattaattgaaagctatactaagttgccaggaattgggcaaaagactgcaactcgcctggcgttctatactttgagtatgcaagaagatgatgtaacgaactttgctaaatctctcctatctgctaaaagagaccttcataactgtagtatttgtggcaatattactgaagatgatccttgtccgatttgtcgcgataagacccgtgatcattcgcaaattctagttgttgagcagttacaagacgttatggcaatggaacggatgcatgaatatcatggtttataccatgtccttcatggagttatttccccagttgcaggaacaggcccggaagatattaatattacaagtttacttaaacggttaaagaaagataatgaagtaaaggaaattattattgcaactaatgcttcatcagatggtgagttaacggctgggtacctcgctaagctaattaagcctgcgggaattaaggttactcggttggcgcatgggttatcagttggcgcagatattgactatgctgatgagatgacattattcaaagcagttcaagggcgaacggagatgtaagaaaatgttttttaagcggcctactaaagaagtggaacgtgaacggaatcagcgcctgttagaagcggtatattctacgaaggccagttgggatcatgcacgtgaaactgaacgagcagtatatgaagcaaacgttaatagtgaacttcattaccgttcccggattcaagaacaaaaatttttatacctatataaaattgctcgtaagtttaaagttcacgggacgttaaatgatggagtaattgatcgctaggagagagaaatggacggtaaatttatatcatttgagggaccagatggagctggcaagacaagtgtaatccaacagattcaacaacaattggaagatcagcttggcacagaaaaagttatgtatactcgtgaaccgggtggtaataagatttctgagcaaattcgccaggtactctttgatggtcaaaataccgatatggatgggcggacagaagcattgctttttgctgctgctcgtcggcaacacattgtttcagaaataattccggggttgaaagcaggcaaagttattctgtgtgatcgatttgtagatagttccatcgcttatcagggagctggtcgtggccttggtgaaaaagagatttggcaaattaatcagtttgcgattgatgggttaatgccgtcgttgacaatttaccttgatattgaatcggaaattggcttaagacggattgctgagcatcgttctaatcaaattaatcgattagacaaggaaaagcttgctttccatcaaaccgttcgtcaatcttacttgaaactttacaaaaattatccagaacggataaagttaattgatgcaagtcagccactggaaaaagtgattgaggatgtaaaagcaacaattcatgaccgtttttcagatttgttttaataaaaaagggtgattaataatgaaaatgattattgcaattgttcaatcaaaagatagcaatcgtttacgaaaagcatttaataaagctgatattcacgttactcaattatcaacaactggtggtttccttcgtgaaggaaatgcgacatttttaattggaattgaagatgaacgagttcaagaagtattatcagtaattaaaaagaatgctgagtcacgtgaacaatacgttacatcgcaaatgcatatggatgttgaaggaggttcagcatttcctgtcaacgtaaagattggtggggcaactgtttttgtcttaccagtagaagacttcattaaattttaagtaggtgaagatggttggctgaacagggacaaacacgtgcagaaaaattacaaccagcaataattactcgttttcaaaaaatattattaaataaagaacttgctcatgcctatctgtttgttgggccaggcggttcaggaaagatgtcaattgctcaatggttatcgttacggttattttgtcttcatccccaagacaataaaccagacttaacttgtgccgagtgtcagcgaatcctgtctgggaaccatcctgatattgtctatgctgctccagaaggtcgccaaataaaggttgatgagattcgtcacttaaaagcagaattttctaagagtgcggtagaaggcaataagaaaatttttattattaaagatgctgataaaatgacaaatggtgcagcaaatagtcttcttaagtttattgaagaaccggggactggcgtttatatttttatgctaacgactaataaaagtgctgtcttaccaacaatccgatcacgaacacaggtgattgaactgccaccattaaaacgagatgcgttgttaacagttttaactgaacataatattccatcatctcagcaacagattgctgttgggattacagattccgtcgcaatgattgaacagtggcaagaagataattggtttgagagtgcgatcaaaggagtcattcagtggtatcaagatacgacacgaaatgggatgttaggcttcgttgatgttcagacaattctacaaaaagtagctaccgaccgggataaacaacaagtgattttggacctaattaccttaatctggcgtgatacgctaatggtaaattccggaattacagttgccaaccgccttcactttaataatattttaggagaaatgggagaagtagttagaaaatactctcctcaacaattgttagcggctagtcagttaactttggaaactcgtcacatgttagaacaaaatattagctttcaaaatattgttgaacaattgacgattcggcttgtgcaggttttaagcattagttaggagcgaaaagatgagtgaagaatatagttcagataatctttatgaacaatttgcgcaggtgatgaaccagacccaggatttagttaataaaatggagcagttgcaggcaaaaattattgctatttctgaggaaaatgttgaactttcaattgaaaataagcatttgcgtcagatgattaaagaaaagcaatcacatcatagtgaaaaccaattatctggatcacggcaaaatttaaaagagctttaccaacagggttttcatgtttgcagtgagtattatggtaaacgtcttgagcctaatgaatcttgtactttttgtttagatgcaatattcggacatgaacaaggaatgacaaaataggagatagtatgcagcaaattagtagttttaatgatcaccaatcaggaagtttatacttagttccaaccccaattggaaatttagatgatatgacttttcgtgcaattaaaaccttaaaagaagtggatctgattgctgctgaagatacgcgtcatactcagcaactattaaaccattttgatatattaacccgtcaaattagctttcatgagcataatgctgaacaacgtgttccggaattgattgagaaattaaaagctggttattcgattgctcaatgcagtgatgcagggatgccttcgatttctgaccccggcaaggaattggtagcggcggcagttagagaagggttgccagtaatcccgcttccaggagctaatgcaggattgacggctcttatcgcttcggggttagttccccagccattttacttctttggctttttagggcgtaagcatcagcaacaggtagcggcgttggagcaattaaaagagcgtgaagaaacgatgatcttttatgaagctccacaccgcttaaaaaagactttagctacgatggcggaagttttcggtaatgaacggcgagttgttttagcacgggaactcactaaacgctatgaagagtttacgcggggaacgcttgctgaaacaactgcctggtttgaagatcatcaaccacgaggagaattcgttattctagtagctgggaatgaacacccgacagaggagacagataatgatattgaattaccattaacagaacaggttgataaggaaatcttaaatggtctttccactaatgctgcgattaagctggtggcaaagaaaaataatataaaacgccaggaattatataaacaatatcatcaattgtaggagaaaaatatggagttaaagcaagaagcacaaacatttgaaatgccgcacttactaacatattatgagtgtgatgaaacaagtcatccaagcctaagcatgatattaagtatgatttccatggtatccgatgagcatagtatgtctttaggaatgggaaccgaagaaatacaatctactggcggtacatgggtagtaagcggctatgaaggatatctttccgcaaatcaaccttcttttggcgaaacagttattttaggaaccaaagctgtttcctataaccgcttttttgctgttcgtgatttttggataacggataaagaacaccagattgaatatgcacgaattaggtcaatttttgtgtttatgaatctaaagacacggcgaatgcaatcaattccactaggtttaattgaaccatttaatgctcctgttgcgaaaagaattcctcgtctaaagcgacctcaaaaattggatgaaaatggttcgataataaagaaaaattatcaagttcgttattttgaccttgatgctaatcaccatgttaataatgcgcgttactttgattggcttcttgatcctcttggccgtgattttttacgagagaatcagataaaaagatttaatttgcagtatcttcaagaggtacgcaatggggaaattgtggaaagcaaagttaataagctccaaataaatgatggaacggtaacttaccaccagattggcgttgataagcaagttgatgcaattgctgagatagaatggtattaaaaattaatcaatgaataatagcgactggtttctaggcaggaaattagttgctattttattttagtcctaaatattagacgaaaagatcttaaatggtttaatgtagagacatttaaaggaagatggtattctatgaatagtagtaattatgaggagtgagttgacgtgaaaagatctttaacggcgattatttacctcgaacccgatcaggttaatttacggatcattgagatacctactttaaaagtgataaataatgttcgatcgggccttctaaatatcggaaacgctaaagttgctaattattcggaaaatatgactgcaattgttaataatattgaaggatttaagcagattattaatgactaccaggcaacaccagttaaattttatggcgatttagaagaccttgacccagttgcaactaggtatgtggccgaccagttagaagttcggacaggattacagattgaatggttaaacaataaccagctaatggcacagtcgatgagttaccttttaaccttgctaccagattttgaaaaacttagtaaacacaatatgtatcttctaagtatcggtcttagctcgactaccttagcttattttcaccatggaagctttgaacgggcatgggatattgatcttggtaatgcaaaaatcagtcagttggtggggcgtctccgaaaaactgctaccaatccaactgaaattatccaagattatatcagtagtaaattagaatacttaacaccagaactgacaaagaaaaagcatacagtaatgatggtgcaaaatgccctctcactcaataaattatttttgccaaatgatcagcaaatcgcggaagttcccctaaataaatttcatgatgattaccaaaagattttatcgccagtaaaagatggcttaatgaaaaatattcagattgatgaccaacaatttgaattattattaccaaattatttagtaacggcgcgaacagtgcgcttaattcaaccagcaggcctttacgtaactgatatttcaacgatggatgggatttcccatggaattggggttgataatcctaaaacgagacggcaaattaatgaaatgatcagaacagctgccgacaatatttcttcacgatacggtgttgattcagctcatcgggattttgtaacgcgcttttcactccaactctttgatcaattgcgcccaattcatcgtcttggtcagcatgagcgattattattagaaattgctagtagaattgatgacattggtaattttattaatcaacggggacactaccgccactctgcttatattatggaggctaatcctctaattgggctttcagataaagataatcggattattgctgaagtggcgagatatcatagtgcagagtctccagatattagtcaagctcattaccgccatctcgatgatgagatccagatgccagtagcaaaattagctgctattttacgattggtggatgcattagatgattcgcggctgcaaaaaatttcaagtattagattgaagctggtaggagatagccgcttaatcattaaagcaatagccaatgatgaccttgttcttgaaaagtggtcttttagtaaaaaatcacaactatttaaggatgtatacggaattgaaccggtcttaactgagaggagcgatcattaagatgtataaggagttttataagccgcagaattatgttaatcgagaattgagttggattgactttaatggccgagtactgggagaggcaactgatactgctaatcctttgttagaacgtgctaacttcttgggaattactcaaagcaatgttgatgaattttttatggtgcgggttgcatcgcttcataagcttgctgctgccaatgttactactactgatgcgtctggtctgactccagaagagcagttggatgcagtaaatgaaaaagaacaccggatggttaagcaacggtatgaagtttataatcagcaaatcatcccgaaccttgctaaaaataatattcatattctccatgtccccaaacttgacgagaagcaatatgaatttattcgtcggtactttaatgatgagctgatgccagttttgactcccatggcagatgatgcctcacgtccttttccttttatctccaataattctttaaatattgctgttcagctacggcgtcaaatccgttcaacaagtgaaccagttgcagaggaaattctagagggagatcaagaagttcatcgtccacaaatggaaccacatgatgatcgtcaagaagcagatatcaaatttgcaacagtccgtgttccagaaatttataagcggttagttcggttaccagaagaaaatagcttcattttgattgatgaaatcattactgaatttctgagcgcgctttttccaggatacgagatcttagctacagcgtcatatcgagttatgcgggatatggacttagatgtggctgaagaagatacgtctgatttgctccgggcagtcaaacggcaattgcgggaacgagagcatggacaggtgatgcgcctagaagttcctgcttctatcgatgaatggttaaaagatcaattaattgataatctgcatgtaagtgaacggtcactgtatgaagtagatggtcccgtcgatttaactttcttaaaaaaattatcggggatggttgatggtcatgatgacttgcgctatccaccatataagccatacctcaacccagcgttagatatggatcataatattttttcttcaattcgccaaaaggattacctaatgcagcatccttatgataattttcaagccgtggtcaactttattcatcaagcagccattgatccagatgttttggcaatcaagatgactctttatcgggtctctggtaattcaccgattattaagtatctcggaatggccgcgcaacagggtaagcaagtaacggttttagttgaagttaaagcgcggtttgatgaacaaaataacgttcggtgggcacaacggcttgaacagatggggtgccacgttatttacggtttagttggccttaaaacgcactgtaaagttgctttggttatccgtcgcgatgaagatgggctgcggcgttatatgcacctaggaactgggaactataatgatgtaacagctcatttttacactgatatgggattatttacttgtgaccatgagctgggcatcgatatgacaaacctgtttaatatgctgtcaggatttgcacgaccagcttatttcaatgaattacgggtatctcctgatgggattcggacatttattaatgccaaaattgatgagcaaattgaaaatgccaaaaatggtaatcctacgttaattcggatgaagatgaattccttgtctgacaagcaaatcattgcccgcctatacgctgctgctgctagtggagttaaggttgagttattaattcgaggcattacctgtttaaggaacgatttgccagaattgcatgggaatattgaggttcattcgattattgggcgtttccttgaacactcccggatctactactttaagagtaatggtcatgaggaagtctacctcgcaagtgccgatatgatgacgagaaatcttaatcgacgagttgaagaattgtatcccgttacccagccagacacaaaagctcatgcaattcatatttttgacgttatgtggaaagataatgtcaaggctcgacggttagtaggagatcattacgaacggattgatcgtggtgatgtcgcaccattcagttcacaagaatactttgttaaacaagcaatgaaattgaatgcgcgtgagaaaaaggagaagaaagcaaaaaaacatttttcttctgtttttgaaactttaactcgccatgttcccaatcttcatttagatgagcgaaaggatgagtaatttatgagcaatgagcagtaccttgcaattcttgatttaggttcaaattcagttcggcttaaaataacaaaaattcaagataacgggagctttgaaacggttcaatatgaaaaaagatatgttcgcctcgcttctaatatggggccagaaaaaatgttgaagtcagctcctgtaaagcggactattgatgccctaaaagaatttcgaacaatttgtgatcgataccgtaataagaaattgacaattattgcggtggcgactgctgcggttcgtcaagcacaaaatcaactgcaatttcttgaaaaggtcaagcaagaaacgggctttgaaattcatgtaattagtggagaacgagaagcatatcttgactatgttggtgttaatcagactcttccaattgataagggaataattgttgatactggaggagcaagtatggaattaatctcggtgaataatggggaagcagaagaagcgattagtattccgatcggttcagttagcatttcgcaaacctaccatcttgaagatcaaattaatccagctgatttatttgatgccatgattaaaattgatgaagttctttctcaacaattatggctaaatcggatgcgggagacaaaaattgtggcactcgggggatgtaaccgtgcattagcaaaggtatatcggtggcaacaagctcttaatcctaatgaagccagaccagttcatgggctaacaatgcgttcagaagaagcctttttgattatgcggcagctattagaaacggatcgccagacgcgggcaggaatccgtggaattacgaaagtgcgagcggatgtaattgttggaggacttctcccccttatctctcttgtccggcaattgtcaattaatgagatttgctttagtaatagtggattaagagaaggtttattatttaagtaccttgagcagcaaattaattttgatcaattaaaatcctcgctataaaattatccactaaaatttttgcttatttttactaaattttactaattagaaacagtaaaattgtgctacaatcactatgaaagctttagttggagcaaggaggaaacaagatgtcaattttagttgctggtggtgccggatatatcggttcccatatggtaaaagatcttattgaaaatggtgaagatgtagtagtggctgataacttatcgacgggtcaccgggatgcgattaatcccaaggctaagttttatgagggtgacattcgtgatcgtcaattcttagataagatttttgacaatgaagatattactgcagttgttcactttgctgctttctcaattgtacctgaatcaatgagtaagccattgaagtactttgataacaatactggcggaatgattactttgcttgaagcaatgcatgatcatgatattaagtatattgtcttcagttcaaccgctgctacttatggggttccagaacacatgccaattaaggaaacggacccacaaaacccaattaacccatatggcttgagtaagttaatgatggaagaaatgatggcttgggctgataaagcttacggtattaagtttgttgcccttcgttactttaatgttgccggggctgccactgatggtacgatcggtgaagatcacggtccagaaacgcacttagttccaatcattcttcaagttgcgcaaggcaagcgtgatgaattgagtatctttggggatgactacaacacaccagatggtaccaatgttcgtgactatgtccatgttatggatttagcagatgctcatattcttgctattaagtaccttaaggaaggtaacaagagtaatgcctttaaccttggttcatccactggcttctctaacaagcaaatgctagaagcagctcgagaagttactggtaaacctattccagctaaaatggcaccacgccgtccaggagatccagattcattagttgctgctagtgataaggctcgtaatgttcttggatggagtcctaagtatgatgatgttcacgacattattgcaactgcttggaagtggcattcaactcatccaaagggttatgatgatcgcgactaataatcggctttaaaataacaaacaggctctcagtaaaacttttgctggggcctgttttgtcgtaaataaacaaaagaaattaaaagagaagtcaaagcggatccagtgtgataagatgtaagatgattgaaaggattgataaaagatgaagattctagccgtcgatacatccaaccacccaatgagcgtagcgttggttgaagatgagcaattgttggcaacgacaacccttaatatggttcgcaatcatagtatttatttaatgccggcaattagtaagttatttaagttagttcagtggcagccaacagatattgatcgggtagtggttgcacagggaccaggatcttatacaggagtacgaattgcagttacaaccgctaaagtattggctgatacagaaaagattgacttaattggcgtatcaagtttagcagtattagcacgtaatgtagttccaacatcatcagcaattattgttcctttctttgatgcacgacgaggaaatgtatttgctggtgcttaccagtgggaaaatggcgagttagtaaataaaatagaagatcaacatctagggattgatgttttgcttaatcaacttgcaaaattagatcaacaagttgttttggtaggtcatatgactgataaaattcaagccaaatatgatcaattaccagctaatgtgacccttttgccacgatcttatagtattccgtcaacttatcaattagctcttgcaggtaaaatgaaggaaccagttaaagagattgacccttttgttccgcattatttacgaattactgaagcagaggctaattggcaaaaacttcatcctggagaaaaaagaaaaaattatgttcgagaagtttaaagaatggtttatcaatacgaccaatcctactaaacgaccgatccttgaatttacacgacgaatagtaatgatatctggtcatcaatacatggtccggatggcaaaggaacaagatattcaaaccttggtagaaattgaagaaagaatctatggaaaagcaccatggagttatgctgctttccgcattgaactccaacggccgtgtgatcgactatatttagttgttgaggatgaccagcagattgttggctttatgggaacagccattgattggtaccattatgatttgcatattacgaatattggcattacaccaagttaccaaaataaaggaattggaacgtatcttatttcaactgccaaaaactatgcccggcacttaaaattacattcgctgagtttagaagtacgagtgtataacgtatcagctcgtcgcttatatgaaagtttaggctttcgtaatcagcatattaaaccacgttattacttagataatcacgaagatgccgtggatatgcaagcaaacttacttaggtagaggtgaaagtattttattatgacagaacgcacattaaccttagcgtttgaatcaagctgtgatgaaacaagtgttgccgtaattgaaaatggaactaaaatcctttccaatattgttgcaacgcaaatcgatagccatcaacgttttggtggagtagtaccagaagtagctagtcgacatcatattgaacaaattaccaagtgtacaaatgaagctttagagcaagcggctgtaggctatgatgacctagatgctgttgcagtaacatacggtccaggattagtcgggtcattattaattggtgtgacagcagcaaaggccatcgcatgggctcataaccttccgttaattccggttaaccacatggcaggtcatatctatgctgcacgctatgttggggaattcaaatatccacaaatggcattgttagtttccggtggacatacggaattagtttatatgccatctgaacatgaataccaaattatcggtgaaacacgtgatgatgctgccggtgaagcttatgataaaattggtcgcgtgttgggagtcaattacccggcaggaaaaacgattgatgaatgggcggctaagggtaaggacacttttaatttcccacgagcaatggaaaaagaagataattatgactttagctttagtgggctgaagagcgccttcatcaatacagttcataatgcagaccaacgtggagaaaaattagataaatatgatcttgcagccagtttccaacaaagtgtcattgacgtgcttgccgaaaaaacaatgcgggcgttagatgattacccagtaaagcaactgattttagctggtggggtcgctgcaaatcatggtctccgtgctcgtttagatcatgacatgaagaaatctcatcctgatgtaccgatgctgcaagcaccgttgaaattatgtggtgataatgctgcaatgattggggctgctggttatgttaactacaagcatggcgaccgtgcaggattagatttgaatgcagtaccgggattaatgttcgatcgaattcagaataaataattataaacataactctcataagcaatgatggcctccagtgttcggtaaaaccggacgctggaggccattattgtactgcgctgtatggatgtaaccgcggtctttttttgcgtttatgattcaccatttgctttgtcaacggcatccatcatggcgtaacggaaaccatttttctccaatgcttccacgcctttgattgttgtacctgctggtgatgttacttgatcacgtaataatgctggagcaagcttgctatcataggctagtgtccccgtaccttttaccatactagcaataacttcatatgcagtttgacgatcgaggccatgcttgacggcggcatcgctcattgcgtccatcatcacatcaacaaatgcagggccacagccgccgataacaccaattatatctagttgtcgttctggaactttgatgacatcaccaagactatctaaaacagtcattacttttgaaattgcttcagcagaaattccggttggcaaggcaagaccaattgtgccggcattaacttcaactggtgtgttgggaataatattaacaatttctttattcggaagcactttggctaagtcttcgtgagtaattccagcagcggcagagataaaaatagtgtgatcgttaaggacggctaattctttagcgactacggttgtaataggggccggggtagtcaaaattacgatatcgggtgtaaggttaactacttcactgtttgtattaacgagtttaaacccgagcttcttagcaaggcttgtaacacgtgaattaacagggttcatcgcactgagggtaaaattttgcgtacgacttaatcccttcataattgcgcttcccatatttccgacaccaataattgtaattttcatctaaaaaacctcctaaattatttccgaacttgcccattaccggtaatttcatatttgattgttgttaattgttgtaatcccattggtccccgggcgtggagtttttgggtactgataccaatttcagcgccaaagccaaattctcccccatcagtaaaccgcgtagaggcattaacataaacacaggcagaattaatggcttgttggaagtagcgtccccgggtaatgttgtttgtaataattgattctgaatggtgagtactatggtgattaatatggttaattgcatcatcaagggaatcaacaatttttacggccataattaaatcattatattctgtctcccaatcttcctcagtaacgggacggatagttgatactaattggcacgccatttcatcaccgcgtaattggacgccatgttccattaaagctttggcaataacaggaagaaattcagcggcaatatcgcggtggataagtaatttttcagcggcattgcatacagaaggccgttgtacttttgcatttacagtaatattggtcgccattgttaggtcagcatccttatcaatataaatgtggcaattacccgcaccagtttcgataactggaaccgtagctgttgttacaacccgctgaataagggcctggccgcctcgtggaatcaagacatcaatgtagtcagtgagattcatcatttcatcagcaatcgcatgactagtgtcggtaataagctgaaccgcatcgaccggtaaatgttgactttgtaatgattcacgaagaatttttactaaggcagtattagtctggatagcttcttttccgccccgtagaataactgcattgccactcttgaatgtgaggccggtcgcgtctacagctacgtttggtcgtgcttcaaagataatgccaattacccctaatggtacgcgccgttgaaggatttgcaacccatctttggtaatccatcccttatcgatttgggaagtgggatcgttcaagtcggcgattgttcggagaccattagccatgtctgcgatacgttgggaattgaccattaaacgatctgtaaatttagttggcatctgggtagcggcgaccaagtcttgttggttggcagcgataatttggtttttatttttgattaaatcatctgccaattgaagcaatgccttatttttggtggcagtgttcattaaagctagtttgtttgcagcgatttgggctctttttccaattgtaattaaatcttggttcattatcatcactcctattttccaaaatgagtaccaatagtatgaccatcaaaaatatcaaaaagaattttagggtcacgaccattgcataaaatcatttgtttacctgcttgcatcattgtggcagctgcccgtaatttagttaccattcctcctgttccaaacctagtgctgctaccgcttgcgacgttctctatttccgtcgttaggaatggaacttctttaatgatttgtgcgtcaggaaatttatgcggatctttgtcataaagggcatcgatatccgaaagaatgattaactcgtcagcgtcaatggcaatagctacctgggaagagagttcatcattgtcactgaaagtagtgtaatgatcaagctcatcaactgacacggggtcattttcgttaacgattggaatcacattttgctgaagtaaagcattaattgtattaagcgtatgctggcgactgacgggataagtgagcacatcacgggtaaggagaagttgggcgacgtgcgtttgatagtctaaaaatcgttgcgaatagattcgcattaaagcagcctgaccgatagatgctaaggcttgctgttgtgctatttcggcgggacgatctgttaatcccaaacttgcaagaccaacgccaattgctcccgaggaaacaagaataagttggtatccttgattgtttaatgtcgcaaggacaaatgaaagttggtcgattgttcgtaaattaatttttccattaggaagaacaaggctactcgtaccaatcttaacaactactttttgtattttatgagtcatagaaaatcctttcagaaaacaaaaagcgcccttaaccgagacaccaattatggcggtaccattctcgtttaaagacgcactttacacttttaaattattttattattagaatatattaaagttgtagcagggcttcggtactggcgatagcttgcagtcgatggctatcgttcctggactgacctacttttatctacaattaaaattttaattggaagactaagcttttgtcaagactaattatttttgagattcaattaaaaatgaattgacaaataattaaaaataaattagaatacgagcaacaattaaatattagtcgtttaagaagagtaaaagcaatgtagtattaagagagttttcgggtggtggaagaaaattacaaattgctttgaagatggtcttaaaaaatacaacaagtgtgaggaaaaaactaagcacttgtcggctgatatccgttatcaagtatcgaagtttattatgaacttcctgaggctattcatgtgagtggatagtaaattaaggtggcaccacgaaaatactcgtccttatttaagttaaggacgggtattttttatggaggtgaaagtgatgaaacgcaaaattgcattagctcaacttgatattcaattaggaaatcctgccgaaaattatcaaaaagctaaacaagcgattgaagaagctgctagtcaccatgcagatatcgttgtcttgccggagatgtggaatgctggctatgccttagatcaattagcagaattggcagatgaaaacggtcaaaagacacaaaaatttcttagtgagttagcgttagaaaatcaaattaacattgtcggtggttcagtagcggtgagatgtggacaatcttttttcaatacaacctatgtttatgatcaaaagggaaatctaattagcagttacgagaaggtgcatttatttggactaatgaatgaagaccgatatctaaaagccgggcaaaaagaaaatcactttgaattagctggggttccgagtgcaagttttatttgttatgatttgcgattccctgaatggattagaacagtcactcgttatggaactgatatcttatatttttcggcagaatggccaagcaaacggattaaacaatggaaaataatgcttcagtcacgggcaattgaaaatcaagcctttgtagtcgcggtcaatcgtgttgggacggatttagagaatagctttaatggtcattcgttagtaatagatccgcttgggcagattatccatgatgcaggagaagttgaacaagtaagttatgcagaaattgacttagcgcagttagcacaggttcgggggccgattccggtgtttaaggatcgccgaccaagtctttatcattaaggggatggaaaagatgaattttgcacaatcaaaattattagacactttaccgaaacaattttttgccaatttagttgccaaggttaataaaaaaataagtgaaggggtcgatgttattaatcttggtcaagggaatcccgataagccaacgccagattatattgttaagagcacgcaaaaatgggtagcggatccgcaaactcataagtattcactatttcggggattgccagcatttaaagaagcagcggcaaaattttattctgaaaaatatggagctgactttgacccagaaaaagaagttgcaattttgggtggttccaagattgggcttgtagaattgccatgggcattgatgaatcccggcgacacttttctgcttcctgatcctggctatccagattacttatcaggagcagcattaggagaagttaattttgaaacagtaccattattagcagaaaataatttcttgccagacttagaggcaattcctgaagaggtggcgcaacgtgctaaattcttctatcttaactatcctaataatccaacgggtgctgtagctactcccgagttttatcgaaaattagttgcgtgggccaaaaagtaccatgtgggcattattagtgactttgcctatggcgcaattggctttgacggtcaagctccagttagctttatggaaacaccaggcgctaaagatgtggggattgaattttataccttttctaagacgttcaacatggcagggtggcgaatcgcatttgcggttggtaatgcagatattattgaagccttaaacttaattcaagatcacctattcgttagtctttttcctgccttacaggaagctgctattgatgctttaacgctgccacaacgtgatgatgcaattgccgaaattgtaggtcgttatgaagaaagacggaatgcttttattaatgcggccgaaaaaattggctggcatgcatttactccccagggtactttctatgcttggatgccggttccaaaggattataccagtgaaagctttgcagatttgttattggacaaagctggcgtggcagtagcaccaggcaatggctttggcaagcacggtgaaggttatgtgcggattggccttttgattgagccagcacgactgacggaggccgttgagcggattgctaaattgaatttatttagttaaggaggaaaaattatggctttgaaatatacggttttaggtgcaggggcaatgggactacgatttggggtattgcttcaagaattagcaggtgcgaaggttgattttgttgataactgggcttcccaagttgaaactattaaacaacagggtggggtttacgtttctcgagaccatgagaatcgacatcttgtaccaattaatatttactcaccagaagaatatgatggtgatccagatgtgtttatcgtttttgccaaacagatgacgcttagtgatttgttacaacgcagtgctcatttcttccgtcctgaccatcaatatgtcttttccgggatgaatggcatgggacatattgaaaaaattaaccaatattttcctaaagaacatgtcgtggccggaacttgtttaattggcacggtccttaataaggcggggaatgtggattttattggtaaacctggtgctggttcgatcaacttagctccccaagtcggcgaaccagatgagcgggtaaaacaaattgttgaggactttaccacggcgaatattaatccccaccttaatgataatttttatggtaccctcctaacaaaagtagtttttaattctgttattaacacgatctgcacgctttttgagattcaaatggggcaatttatcgattacgatggtgcagaaaagcttggcaaacagttaattaatgaagcattcgatgttgccgaacgggctggtattcagctcttaagcactcgtgaggaggagtggcaaacgattaaatatgttagtgaagttaccagcccgcttcattatccatcaatgtaccaagatatgagtaaaaatcgaccaacagaagtagattacattaatggatatatttatgatttaggtaagaagtataactatgaggcatctactcacgacttcttgcgtaatttagttcaccttgcagaaaatactcgtaaattccgacaaaactaaaagaagaagcggacctgtccgcttcttcttttagttttcttgatcaaattcttccagtttttctgctgcttctgtccatgcaagttcaaattcttcagatttagctgataattcatcaagttctttttgaagatcggttaattttccaatatccgtagcgatctctggttgactcatttgttcttggattgcggtttgtttttcttctaattccgccatctgttgttctagctcatcgacttgtcgctgaatttttcggcgagcgcgctgctgttctttgctttgctgataagattgtttaccagctggtgctttagtaatggtggtggaattatgtgaagcagcttcagatgaactttctttttccttagcaattaggtagtcatcataattgccttcgtaatgtttaattccgtcgtgttccattgctaagatatcggttgcaacctgattaataaagtaacggtcgtgagaaataaagagaacggttccgctaaattcgttaattgcgttttcaagcacttctcgactatcgatatctaagtggttagtcggttcatcaaggataagaaaattaatcggtttaaatgagagcttagttaactccaatcgtgctttttcaccaccagataggtcatgaacaactttataaacatcatcaccaacgaataagaaactacctaataatgagcgaatatctttttcaggtacttctggatggtcatcccatacttcttctaaaactgttttatttggatgtaattgttgctgttcctggtcatagtaaccgatatcgaggttagcaccgagtttgattgttccactaattaacggaattttatggagaatagatttaagtaaagttgattttccgattccatttggtccgataatcccaacacgctgcggcttgcggacattaaatgaaagcggcccagcaaggatctgttcatcgtagccaacttttgcctgctccacatcaagaacttcatttccgctatctttttcagaatggaattgaaaatggattgatttatcatcagtttctggacgctcaagccgctccattttttctaattgctttcgccgcgcctgagcacgtttagttgttgaggcacgaacaatatttcggttaacaaagtcttctaacttagcaatctttttttgttgttggtcatagtgtttccactctgcttctaatcgttcttgcttgtgtttaacaaattgcgtgtagttaccagtatagtgggtgagtgttttattatcgagatcataaacatcgttgacaacacgatctaagaagtaacggtcgtgagagacgataagcaatgcaccttgataacttttaagataatcttctaaccatgaaagaacgttcatgtcgaggtggttagtcggttcatctagaatcaaaagccccggtgcttgcagaaggatctttgctaaggcgagtttagttttttgccctcctgaaagggaattaattggcgtatcataactatcttcgccaaaaccaaatccatgtagaattccccgcatacgtgattcgtattcgaaaccaccctgtttcttaaaggcagcttgtaaattatcgtatgttgaaagaatttgttgataattgctatcggaactatcaaggtcagcgaactgttgttcaagatcgtggatttgcgtttccattttgtggagaggagcaaagacagtatctagttcagtccaaatgctattttgactatcgagtccttgatcctgggccaagtaaccaattgtcaaatctttaaccttcgtaattgttccttcatctggttcggtgattccagcgatcatttttaacaaggtcgttttaccagcaccattacgcccaacaagcgcagtacggccatgctcttggatttgcatgttcatattgtgaaataaaacgtccgcgccaaatcgacgcacaacgtcatttgtctgtaaaagtaacatattgaaacctcatttaattcgttgatttaatatggttttattttagcagatttttaattttaaataaaaatttgaaaatatttttgtattttagttcacaaaaaagggtttaattgctagaatatactcagacttaaatttcacaaagtaaaaattagtaacattatccttgtcaaaaacttagtaattagttggcaaactaggttgagaagggcttgttttaggaggaacaaaagtagaatggctaataaaaagattccacgcgcgactgcgaaacggttaccaatatatttccgttatttaaatgtattgaaagacgcaaataagcaacgggtatcatcaactgaactttcggaggctgtgcaagttgattcggcaacgattcgtcgtgacttttcatattttggtgaattaggtaagcggggatacggttatgacgttgaaagtctattaaagttttttaaaggaatcttacaccaagactcattagttagtgttgccttagttggagttggtagtttgggaagtgccttgttaaactttaatttccaccaagataccaatttacggatcagtgcggcatttgatactaagccagaatatgccaatacagtcaaaagcggtattccaatttacccatccgaggatatggtaaagcagttaaaagagcaacagattgatgttgttattctaaccgttccaggaatcaaggcccaacatgttgcggaccaattagttgaagctggtgtgaagggaattcttaactttactcctgttcgtttatctgtgccaaaaaatgttcaagttcaaaacattgacttaacaaacgaacttcaaacattaatttacttcattaaaaattatactgaagattcaattgaataaattaggagagcattggtttgatgaaagcgtccaaccaatgctttttgtttactaaattattaataaaagtcatggattgtaggtatgatctcttaagttttaaaaaatggtcaaaaaaagtcaaagtatttttgttgcattttaaagagaacatgttatatttaaacatgtggttagcacttgaagagtttgagtgctaaaaataaaatttattaacaagatggagggattaacgtgttaaaaccattaggagatcgcgttgttctaaaagctgaaactgaagaagaaaagacagttggtggaattgtccttgcttccaatgtgaaggaaaagccaactactggaaaggttattgccgttggagaaggtcgtactttagaaaacggacaaaagcttgctccagctgttaaggaaggcgaccgcgtattatttgataagtacgcaggcaacgaagtagaatacaacggtgaaaagttcttagttgttcatgctaaagacttagtagcaatcgttgaatagttaaataagcgaattaagagcaggagacagaaagaatgaaattccttcaccgtctcttttaaataatgaatttaattttgaggtgacataaatggcaaaagaaattaagttttctgaagatgcacggagcgctatgctcagtggtgttgataaattagctgatactgttaagacaacaatgggtccaaagggacggaatgttgttttggaacaaagctacggcacaccaactattactaatgatggtgtaactattgctaagagtattgaacttgaaaaccaatttgaaaatatgggtgcaaagttagtagccgaggttgcttcaaagactaacgatattgccggtgatggtactacaactgctactgttttaacccaagcaattgttaatgctggtatgaagaacgttacctctggtgcaaacccagttggtattcgtcgtggtattgacaaggctaccgaagttgctgttgaagctttgaagaagatgtcacacgatgtaaagaccaaggatgatatcgaacaaattgcttctatttcagctgctaatccagaagttggtaagctaattgctgatgcaatggaaaaggttggccatgatggtgtaattactatcgaagattctcgtggtgttgacactagcgttgatgttgttgaaggaatgagctttgaccgtggttacatgtcacaatacatggtaactgataacgacaagatggaagcggaccttgacaatccatatattttgattactgacaagaagattagtaatatccaagacattttgccattgcttcaatcagttgttcaagaaggccgtgctctcttgatcattgctgatgatattactggtgaagcattaccaactcttgtattgaacaagattcgtggtacctttaatgttgttgctgttaaggctcctggctttggtgaccgtcgtaaggctcaacttcaagatattgctgttttgactggcggtactgttatttctgacgaccttgggatgagtcttaaggacgctactgttgatcaattaggtcaagcaaacaaggttacagttacaaaggatactactactatcgttgatggtgctggttcaaaggaagctatccaagaacgtgttgaccaaattaagcaagaaattgctaagtcaacttccgactttgacaaggaaaagcttcaagaacgtcttgcaaagctttcgggtggggttgccgttgttaaggttggtgccgcaactgaaactgaattgaaggaaaagaagtaccggattgaagatgccttgaacgctactcgtgctgctgttcaagaaggatttgttcctggtggtggaactgctttaattaacgtaattcctgctcttgacaagattgaagccgatggtgatgaattaactggtatcaatattgttaaggctgcccttgaagcaccagttcgtcaaattgctgaaaacgctggtgttgaaggctctgttattgttaatgaattaaagaacgaaaaagaaggtattggttacaacgctgcagatggcaagtttgaagatatgatcaaggctggtattgttgacccaacaatggttacccgttctgctcttcaaaacgctgcttccgtatcagcattgcttcttactactgaagcggttgttgctgataagccagatccaaatgctaataaccaagctcctgctgctccacaaggcggcatgggcggtatgatgtaataccatttgactaaaatttaattttgtgggcagaaaagattctaatgtttgttttttcaaatgttgggatctttttttattggaggaaaatcaatgacgaaaaatgcaaccagtgtctataactatttagacaacgaaaaaataaactatcaaattgttactcatcccccagtctatacagcggaacaagcagacaagtatgttcaagaatatcaatttgcccgtacgaaaaccctttttctaaaaaataaagctggctattatttagttacaatcttagaaaataagcgtctcaatatgaaaaaattgaaagagaatctatcgactagtcggttttcatttgcccacccagaagaattagctatgaagttaggaataacaagtggggctgtttcaccctttaacttgtttaatgataaacaacatcaggttacctttattattgatgctgatatctttaagaacgaggagttaatagggtgtcacccaaatattaatacggccacagtgattttgagaacaaaagatttgcttcaaataataaagttgaatggtaattcagttaaggcggttcaactataaagttaatctaaaaatcttaaattgtggtaaagtaaattagtattaatttttaaccaaactataactgaaaggaactaagaaatggaaaaaatgaaattccagaagataacgctattttctggtgtaatgcttgccttaaattccttaattggttcagggtggttgtttggtgccggaactgctgcaaaggttgccggaccagctgctattttgtcatggatcttaggagcaataatcattattagcattgcccttacttatgttgaattaggggcaatgtttccagaaagcgggggaatgagtcgttatgctcagtatagccacggtccgtttttaggctttattgctgcatgggcaaattggatttcattaatcactttagtcccaatggaagcagtggcctcggttcaatatatgagctcgtggccgtgggcatgggcaaattggactcaccactttatgaaaaacggtaatattacgactcctggattgttagttgtatttggctttatgctggtttttactttgatcaatttctggtcggtaaaattgatgactcgctttactaacttaatatcaatttttaagattttattaccgacactaacaattgtgatgcttattgcggcgggttttcatcctagtaattttggtcatagcgtaactacttttataccatatggtagccggtcaatctttgaagcagctgctatttctggaattattatgtcttatgatgcctttcaaacggtaatcaacatgggaggagaaatgattaatcctcataaaaatatcgtgcgaggcgtattgatttcaatgattattaccgctgtgatctatgtcatgttacaagttgcctttattggagcgattgatccgaatttattagcgcaaaaaggatggcatgggattaactatacgtctccatttgctgatattgcgatcctgctggggatgaattggcttgcaattttgctatatatggatgcttttgtttcaccatttgggacaggggttgcgttcgtggcgactgcctcacgagcattggcagcaatgactcatactggacatttgcctcaatggttgggacggctagaacggcgctacatgattccgcggcttgcaatggttgtggatctaattttagcggtggtaatggttagtctcttcagaaattggagtttgttagccactgtaattaccggttcaaccttaattgcttatcttaccgggccagttactgtaatgtcgcttcgcaaaatggatgctaatttaaagcggccgtttcatccgcattttatgtcctggttggcgccatttgcatttgtcttgacgagcctttcaatttattggacaatgtggccgacgactgttcaggtaattggggttatcttattaggcttaccaatttatctttattatgaagttaagtatcgtcacgcatcagggctacgtgacttacgcaatagttattggatgttggtttatcttgtttttatctcaatagtttcttacattgggagtgaaggatttggcggcaaggactggttgaagtacccatgggattttgttgttattatcatctgctcgctaggattttaccggtgggctgtggctagccggatgaaaaaagtcgatcctgcggcagaaaaggttaatgccaaggtaaagatgccaggaaaagatcaatagatatatttgtaggttgcaaaattaaagaataaattgtaatattgtcacctacttaaaaagtgtaaaaatcaaaggagaaatagtatgtggcgctatttgaaacgtgttttaatcgggaaaccgttaaaaacccttgatgaagggcaaacacacttaactaaatttaaagcattagccatgctttcttctgacgcaatatcgtcagtagcatatggaccagagcaaattacaactgttctggtaactttatccgcagcagcaatctggtattcaatcccgattgcggcagttgtgttggtccttttgttagctatcacgttatcataccaacaaatcattcatgcctatcctagtggtggtggtgcttatgtcgttgccacacggaattgggggagtaatgggggattatttgctggaggatcattactagttgactatatgttaacggtggctgtttcaacgacatctggagttgaagcgattacttcggcagttcctgctttatataaattttcaattccaatcggaatcgttattgtccttttaatcatgtttatgaatttacggggaatgagtgaaagtgcaaacttccttacaattccggtatatttctttgttattatgatgattgtgatggtagtgtggggtggctataatattgccactggtcatattcattaccgggcaattgttgattatggaacaccggtatcgggaatgtcatttgttttgcttattcggtcattctcagctggttcgtcatccttaactggggtggaagccgtaagtaatgctgttcctaactttaataagcctaaagaaaagaatgcatcaactaccctggcaattatgagtgctattttagcgttcttctttattgccattatcttctttagtttttatctgggggtagttcctaattcacggacaacaatcctctcccaaatggccgcacaaatctttggtgggcatgggctaggcttttacctcttgcaactttcaactgcaatgattttagcggtcgctgctaatactggtttctcagcctttccaattcttgcctttaatatggccaaagataaatatatgccgcacgcgttcatggatcgtggggatcggttaggttactctaacgggattatttccttggcgattggagcaattattttgatcttgatcttccatggtcagactaatatgttaattccgctttatgcagtaggggtatttgttccatttactttatcgcaatctgggatgattattcactggtttagagaacgggaaggtttctggttagggaaagcctttattaacctagtaggagccttgatttcatttgttcttgtcatttgtttgttctggcaacactttgcaaatgtttggccatacttaattatcatgccgctgcttttatggatgttccattcgattcaccggcactatgtaaaagtagccgctcagttgcgggttactgaaaagacgaaagttcaattacatgattacgatggtgcaacggtgattgttttagttggtaatgtaacccgggtaactcgtggtgcaattaattacgctcggtcgattggtgattatgttattgccatgcatgtttcgtttgatgaaaatccaggcaaagagcataaaacagcaaatgaatttaaagctgaatatccagatgtccgttttgttgatattcactcttcgtaccgttcaatcgcaaaaccaacgttacgttttgttgatgtgattgcaaaacgagcagaagcaagaaattattcgacgactgttcttgttccgcaatttattcctaaacatccatggcaattggccttacataatcagaccagtgttcgtttacgggcgttattgaattcccgagagaatattattgttgctagttataactatcatcttcaagaatagtttatttagagagaaagtattgatttaatgaataaaaagcaactattatgggggcttttgtttgcagttggccttttcatggcggcaagttataccattgataatcgtggctttcattctggaatatacggtatcattggctgtgctttgatcttaatcgcgtatgcgggaatgaattgggaaaaactgcaatcaaaagatcaacatacgagaaaaattttagtgcttttgagcagtattttagggattatcattgtccttgatattgctgaaatgattttaggataattaaataaagcttattgagggagcgagacagaagtcacttgtgacttcgtttttcgacgcgaagctagcctctgggagcccccgcaagcaacagtaggcctccaatgttcggttttgtcggacgttggaggccattgttgtactgcgtatttgctttttatgaaagtaacttaacttatgtcacagtcctttttatattaactaataagctaaatcatattatcctttttgctagtcggctaacaaaaaggagagatgaaaattgctaataggtcgtctagtaaaacaagctaacaatgcgatgaatcaagaaatgaatgcatttgcgcagcagtatggattgacaggaacgcaaatgtcgattattgattttttaacgcatttcccgggaaatagttgtgatcaacaccagattgaaaatgaatttggaataaagagatcaaccactactgtattacttcaacgaatggcaaagaaaaatttaattgaatgttatccgtcaccagaagatcgccgtcaaaaaatcgttacgcttactgcagaaggccaaaaattatcttcagatgtaagtgcgtatattacacaatacgaagagaaattaaaagcagattttagtgaacaggacatttcgaaaataagacgattcttatcaacgatgatagaggagaaataatgagtacgaatactgaaaaaatttcggcaaaagttgttgcagcgattgtggcaaccggattgatgtcattttgtggggtaattgtagagacagcgatgaatgtgacttttccgatcctgatgcgtgaattttcgattactactaatcaggcccaatggatgacttccatttatttgctcttggttgcaatcgttgttcccttatcggcaattttgaaaagctcttaccgaacaaagatgctttttacagttgcaaacttgctttttatcagtggaataattattgatgcactggcgccattatttggggtgcttttagttggtcgtacaattcaaggaataggaactgggattgcattaccattgatgtttaatattattatggagcaagttccaacaagcagaattggctttatgatggggagtggaaatcttattactggagttgccccagcgattggtcctacttttggtggaatcgttgccagcaagcttaattggcggtgggtattttattcattaattccgcttttaattatttcgtttgtgcttggtgaatggggaattacccaaaaatcaccgattaaaaagcaacaaattgatctttttagtatattaatgattgtattcatgttctgtggttttgtaacagaatttagtaacctgggaagccaagccttcatgaccttttcagttggtagtgcattgttaatcgggatcttaggaatgggactttttgctcggcgttcattaaccctaaaagaaccaattttacaattacgattatttagaaataaaaaattttctgggcatattcttggtttctttttaacccaacttatttcgttaggctttgcatttcttttaccaaactatattcaattggtaaatggtaatagtgcaatgacagctggcttgattgtccttccggctggttttgtgggtgcgatatttgccccattgggaggaggattttagataaatttggcgctcgcaagcctattttgattgggacttcattatgtctaattgcgcttattgcttttacaatctatggatagcatttaacaaatatatttattgcgcttgtttatattctctatatgggtggaatgggaatgtgcatgggttgcgtaatgacaagtgcattaactgttgttggtaaagcaaagcaatcacaaggaaatgcgatccttaatactttgcagcaatttgccggggcaattgggacctcattagtagcgatgattgttgcagccagtcagagtcatctccacacgactagacgtatctctacggcaattggtactcaagaagcttttggcatgttaacgattttttgtattataatttggataagttactatcgaagtgtgaaaaaataaaatatggtggattatagaatgaagttagccacccagttggtggtaaataaaaaacgccattcggcgtgacatcaggtatcatattaagtgaaccaaacctatatgaaaggatgtccgtcaaatgacgcacttaaatgataccatgtctactagtttattgactactcataaaaagaatgctcatcttactaaagaagaacgtgtgatgattgcgactttaaagtcgcaaggactttccaatcgcgcaattggtcgccaattaggagttaattatcaaacaattaataacgagctcaaccgtggtacggtccgccagcttcgtcgtcaaaaatctaatggtaagatttacgaatattcttactacatctatagttatgaagctggtcaggccacatatcttgaacatcaccgccattctggtcgtcgttgcttatgttattcttcaaagcaatttttacgattagctgatcagctaatgcttggtgagtttgacgaccaacattactccccacaagcggttatttataaggctcaagatttaatgaatgatggcaccctgatcccaaagtcggttgtaactttatatcaatggattaatgagggtgtgcttcgtacgtctaatttagacctctttgaaaaacctaaacgtaagcatcgtcgaactcatccgcaagctaaaaggtgcttagggcctaatattgctcaacgacctcaaactgcggaccaacggtccgaaattggccattgggaactagatacagttcagggacagaaaaacggtaatgacagtgttgtactagtaatgactgatcgcctttcacgagttaatatcacgagtaaaattgctggtaaaactgcgcatgcagtaaatcaattctttataaatttacgccagaaaatgggcacagatgcttactatcgcatctttaagacaataacctctgacaacggttcagaatttagtgagttaacacaagttcacgatcatgttttctatgctgatccgtattccccttgggaacgtgaatccaatgagatcaataaccggtttctccgcaaggagattaccaaaggtgaagctataaataactatagtagtgctcagatcatagcgactaatgattggatgaatcactatccacgagctatgtttaatggacattcgtcaatggatatctatcgtaaggccttctaccaagagatatcacagctccatcaaccaataatcaattggtcagtattatttatttgagtccagtggctaacttattcttgaaatttaggaaaaataaaatattaaaaaattcaggctagaaaattctaacctgaattttttaatatggaatttcgttaaatcgctgatcgccctcagttatttgaagctggtcgttaaaacgattaatgagcttttctttgacatcttttaagtccgtttcgtttacataaatacttgtttcaacattaaccccgtactcctcactagcaacctcaagattgttctccttgaggtagtaaagaaggagatcgtgaagagcataggtaacagtgatttttagaatttcttgcttgatccgttggacgagaccagcctggtggattgcttcagtagttgtattgctatatgcccggatgagaccacctgcgcctagcttaatcccgccgaaataacgggtaaccactgctacgacattgtggatctttgcaagtttaagcgattcaaggatcggaattcccgcagttccgcttggctcgccattatcactttctcgctggatctggtcgttgtcaccaatcatgtatgcaaaacaattgtgagtagcttttttattagctgcttgaatactggcaataaactgttgagcttcttcatctgaggagacacgggcaatggagcaaataaatcgtgattttttaattatttgctcataagtagtgtttttggcaattgttaaatatggttctgtcatttttaaacttccttcgtgctattttaattagtttacgtatatataaagtaggaggtgaataatggatctagaaaattattatgggagacgagtcttggcttcgcgtcatgaggtgaaacaatcaggaattcaagaactgccaacaatcagaattgacgctggtaatatcagatgctatcgctgcaatcatgtcacggcaaaatcgctgggcgctttgccacaaggcgagttctattgtccgcattgtattaatcttggacgcgtttcaacgttaaataaattttatcatgttccagagccaaatcaatttacggttaccgaaccggtattaacctggaaagggaaattgtcgcctcttcagcaacaagcttcagaaaaaatttcccggggaatggctgaccatgtccaacaattattatgggcagttacaggtgctggaaagactgagatgatgtttgcaggtattgcggcagctattgaacgtggtgagagaattggaatagcttctccacgagtagatgtttgtttagaattatttccccgtttaaaagctgcctttgctaattgtgatattgctcttttgcatggtcgacaagaattaccttatcattatgcccaactgactatttgcacaacccatcaattgcttcgtttctatcatgcttttgataatttaattattgatgaagtagatgcctttccgtatgctgctaatgcttcgttattatatgcgactaagcaagcaataaaagagaacggagggtgtctttacttaactgcgaccccaggtgatgctttgctgcgagaaattaaaagtaaacgattagttgttaattatttgcctcttcgttatcatgggcatttacttccacaaataaaagttagactagcttttggatggcggcgacgattagaacgtcagcaattacccccgcaagttattcaacagttgcaggaaacgctaaaggaaggccatcactttttgctatttgttcctcatattgcagatttagcattggttgaagctgcattacggcattcttttacaactttccgctttgctactgttcatgcaagtgatctagaacgattagaaaaagtccaaaaaatgcgtgatggtgattacgactttttagttacgacttctattcttgaacggggagtcacttttccagaaattgatgtctatgttttgggtgccgatgatccagttttttcctcctcggcattagtgcaaattgctggtcgagctggacgttcgcaaagtcgaccaactgggcgggttattttttggatcaattgtaattgtcgacaagttaatcaagctgtttcccaggtgaagtacttgaatcggaaaggtcaaaggttaatagatggagtgtcttttgtgcaataaagggatatctttccaactaactttgaaagatatttttagctttcgcgaaattatcacgccagtagtctgcactaaatgcaaagaaagttttgtgcgctgggatgatcacggatgtgcaggatgcggtaaagaaaatgttaataaaaatggtttcttatgtgcagactgtcagacttggaagaaactttatggttggtacttgcatcatcgaggattatatcggtataacgaggcgatgaaagaatatatgcaacgttataaatttaatggcgattatcgtttatgcgtggtatttcagcgtgaacttagcaaagtggttaatgaacagaaagcagatttaattgtcccgattccagtaacgtcgacaacgatgcaaacgcgtggctttaatcaggttattggtctattatgcgaagtaccttaccaatcgatcttacgaactaagataagttcaaaagtggcacaatcaagcaagacaaaggaagagcgacttgcaactaaacagccattcatacttgatgcaccagaaaaagtaattaataaaaaggttcttttagttgatgatgtttatactacaggaaggacactgtatcatgcggcaaacctttttaagcaagctggctgtaaagagattggtagcgtttcactagcacgttaaattcttcttaaaatgtattaataaaatttgttaattaacacaaactaatctataataaaaataggatatgagaagagtggtccttctgatatcagatcaagcaattgcttggctgaaaggagagaagtacaatgttaaagttcaatattcgtggtgaaaatgtcgaagttactgagtcaattcgtgattacgttgtaaagcgaattagcaagcttcaaaagttctttgaagatagtgttgaagctaccgcccacgtgaacttaaaagtttatccaaaccggacgtataaggttgaagtaacaattccacttccatacctaacgttgcgggcagaagagacttctaatgatatgtatggaagtattgacttagttactgataagcttgaacggcaaatccggaagtacaagacgaaggttaaccgtaagtcacgtgaaaagggcttaaagaaccttgaattcatcccatctgataatgatggaacagatggacaagatgatgaattaaagattgtacggacgaagcaagtttcattaaagccaatggatcctgaagaagctgtccttcaaatggatatgcttggacacaatttctttatcttccaagatgctgaaactaatggtacaagcattgtttaccgtcgtaatgatggtcgttatggcttgattgaagctgaatagtcaatgccaatatgaagagcgcggatgagaaatcattggcgctttttgtatcttataacttatagccaccttgtaatatccatactaataatttttatttatactatgaacgtggtaaaatattatggttagagtaaaaaacataattggcttgagtagtacttttttattgattttggacttaagccagaaagtaggaaggacgcttttatggccaatattctaaaaaaatggattgaaagcgatcgtcgtgaattacggcgaattaacaaaatagcaaataaagtcgagagttatgctaaacaaatgtctgaactaactgatgaacagcttcaggcaaaaactgatgaatttcgggaacgttataaaaagggtgaatccttggatcatatgttgccagaagcattcgcagtttctcgtgaaggggctaagcgggtcctaggactttacccattccatgtccaaatcatgggagggattgttctccacgaaggtaatattgcagaaatgcggactggtgaaggtaagacattaactgccacaatgccggtttaccttaatgcaatctcgggaaaaggtgttcatgttattactgttaatgaatacttgtcaaagcgtgatgctactgaaatgggacagctttataattggcttggatgttctgttggtattaacaactcagagatgagccctgatcaaaaacgagaagcatataaagctgatattatgtattccactaatagtgaaattggatttgattaccttcgtgataacatggctgtttacaaagaagaccaagtccaacgtggtttaaactatgctttagttgatgaagtggattcaattttaattgatgaagcgcggacaccattaatcatttcaggtccaggaacgggcacttctaagttgtacaagcaaactgatcggtttgttaagcaattaaagaaagatgttgattataagattgatcttgaatcgaagacagtttcattaactgatgaaggaattaaaaaagctgaaaaatacttcaacttaaagaacctatatgatccagaaaatactgcgctgacccaccacttggatcaagcgttgcgtgctaactacatcatgcttttggataaagattatgtggttcaagatggtgaagtattaattgttgattcctttactggacgtgtaatggaaggtcgacgtttctctgatggtcttcaccaagctattgaagccaaagaaggcgtagagattcaagaagaaaacaagacaatggctaacattacataccagaacttatttcggatgtataacaaactggcggggatgactggtactgctaaaactgaacaagaagaatttcgtgaaatttacaacatggaaactattactatcccaactaaccgtccagttcagcgaaaagatgagcccgatttgctttacccaacgttacaaagtaagtttgtagctgttgtcgatcggattaaaaaacttcatgctaaagggcaaccaatcctagttgggacagtcgccgttgaaacctctgaatacttatcccaactgcttgataaagagaatattccgcatgttgtcttaaacgctaagaatcacgctaaggaagcggaaattgttaaaaatgccggtcaaaagggtgcagtaactatcgctaccaacatggcgggacggggaacagatattaagttaggccctggcgttcgtgaaattggcggactagcagttattggtactgaacgacatgaatcacggcggattgataatcagcttcgtggacgttctggacgacagggtgatccgggattatcacaattctacctatcgcttgaagatgatttaatgaagcgatttggtggagaccggatcaaagccttcttggagcggatgaaagttaatgatgaagatgctgtcattaaaagtcgtttcttgactcaccaggttgaatcagcacaaaagcgagttgaaggtaacaactacgattcacggaagaatgttcttcaatatgatgatgttatgcgtgaacagcgtgaaatcatttataaagagcgacaacaaattatcactgaagataagtcgctgaagtgggttcttatgccaatgtttagacggacaatccagcgtgaagttgatcaacatactcttggtgacaagaaggattgggatttacaaggaattgttgactttgcagaagaagtcttaatcaagcctgataccatcacagttaaggatctagaaggtaaatcacctcaagaaatggtagattacttgatgacatttgcccagggagtttataaggaaaagcaaaaacaactttatgatccagcacaaatgcttgaatttgaaaaggttgttattttgcgggtggttgactcacactggactgatcacattgatatcatggaccaattccggcagtcagttggtttacgtggatatggacaattaaatccattggttgaataccaaactgctggttatcacatgtttgaacaaatgattgctgatattgagtatgaaactactcgactcttcatgaagtcagaaattcggcaaaatgtaacacgttaattgttaattactactaggtacggcagtaaggtaacccatggcggtaccgctgccgtattgttgtataacggaggttcgattgtggaattaaatgaagcaaaaaaacaagtagaatcaatgcaaaaagaagttacgcacttcgggaggtctctttgacttagatgcactagatgagcgcattgcagaaattgaacaagagatggctcaaccagacttttggaatgataatgagcaggcacagaaggtcattgcggaaaataatattttaaaagaaaaacgggatacttttgtgaatttacgtgatcagattagcgatcttgaaacgtcgcttgaattgctcgcggttgaaccggacgatgatttacaaaaagatttcgaagcatcatttacaaatacacaaaaggctttagaacagtatcgcttaacgcaacttcttgatggggagtatgacgctaagaatgctatcttagaaattcatccgggagcaggtggtactgaagcccaagattggggtgaaatgcttctgcggatgtatattcgttggggtgaacagcatgctttctccgttgaaacagcgagttatgaagccggtgatgaagcgggtatcaagagtgttacgctgctaattaaagggcataatgcgtttggttatcttcgtagtgaaaagggagtccatcggcttgttcgtatttccccatttgatgcggctggtcggcgtcatacatcatttgcttcggttgacgtaatgccggagttggatgatagtgttgaggttgatattgatccatcagatttacgagttgatactttccggtctagtggtgctggtggtcaacatattaataaaacagaatctgctgttcggattacgcatattccaaccgggattgtaacctcttctcaagctgaacgatcccaacttcaaaaccgagttactgcaatgaatatgttaaaatcaaagttgtatgaactagaagaagaaaagaaagctaaaaagcgggcggaaattgagggcgaacaacttgatatcggttggggttctcaaattcgttcatatgtttttcatccatacactctagtcaaagataatcgaacaggttatgaaacccataatggacaagctgtaatggacggggaccttgatccatttattgatgctttcctacagtggaaacttagtcaaaagaatcctcaataagttatttagtttggaaggaagtgagtaaagtgcgcgaaagtcaacataaaagattaactcgctcaggatcagatcgaatgatagctggtgtatttggtggaattggccagtactttaagattcagccaaatattttacgtactttatatgtcttactgactatttttaccggttttgttccaggcattattatctatattattttgataataataatgcctgctgatccgcaaaatcccgatttactaggatttttaaagtctttcagtgaatcacaaaaaacatctcaacagcctcaccaacgttctcggcggactttaacgaatgtcgaggaaaaagacattaaaagaaatggaagatcatgatggaattttggaaaagagtattgattgatacaatcctttttattgcccttgctggtttatttgccggaacagggatgttttatattacaagtgcttggattgcaccattggcaagctttgttttagcaattttgaacgttgctattaagccaattttagtaattttatcgttgccgattaatattttgaccctgggcctttttagtgttgtaattaatggaattatgctacaactaacatcgatgcttgtcgggtcggcaaactttcatttttcgtcatttggttctgcaatgttgattgcgattattatggcaattttcaatgcagttattacaagtcacgaggatagattgtaaaggagtggagaaaatgccaaacaatgtaacggtgcaagaattagttgataaggtccggttgaaagtcttacaaggagaagattacctccaacgtaagataacaactagtgacatttcacggccagcacttgaatttgcgggatattttaagcattaccccgcagcacggattcagctgttaggaatcaccgaaacctcatttgctaaagacttaactcatgagcaacgtgaagagtacatgacaaaaatgtgtatgccacaaacaccatgttttgttatctcaactaatctgccaattcctaaggagctaaagaaggcggcggaagatgcaaaaattccaatcttaggaacgcatttaacctcttcccaaatattaagtaacatgacttcttacttgcttgaacgtttggcaccacgaaaatctctccacggtgtattagttgatatcagtggggttggagtactcattactggtgattcgggagtgggtaagagtgagaccgcgttggaacttgttcgtcgtgggcaccgactgattgctgatgatcgggtagaagtttacgctcgtgacgaacagaccttggtagggactgctccgcaaattttaaaacacttaatggaaattcgtgggattgggattattgatgtctctacgctttatggaacaggagcaattatgccttctgatcaaatcagtttaattgtacatcttgaaacgtggactccagatgtacagtttgatcgtcttggtgatcgtggagatactcaaataattcaaggcgttattgtgcctaaagtttctgtcccggttaaaactggtcgtaatttagcgattattattgaatcagctgcaatgaattatcgggccgagacaatgggctatgatgcgactgaaacatttgatcgaaaccttaaccagttgattaagcagaattcagaacgtgatagtaaaaataacaaggggtcggcaaactagatgattaatccaggaataaaagccgctttaaacccaattgctttccaagctggtccatttactattcactggtatggcgtcattattgctagcggggtagttttggctctcttgttagccgttcgcgaaggaaagcgagaaggaatttctgaagatgatttttatgattatcttttatgggcgctcccaattgcgataatttgcgcacgaatttactatgtagtatttcagtggagctattattctcagcatccaagtgagattattgctatctgggatggtggaattgcgatatatggagcgattttaggaggctttattgttttacttgtcttttgccattaccgtcatttatctagttggctgatgatggacatcattgccccaacccttattatggctcaaggaattggccggtggggtaactttatgaatcaagaggcatttggtgatattacgacacgggcgcatttaatggctcagcatattccaaattggataataaaccaaatgtatattggtggtcactatcgaattccaacgttcttatatgagtcactatgggatttaactggctttgcattactaatgttacttcgtcatcgcaaacatttatttcgtcgtggtgaaattttcttaacctatgtaatgtggtatgcatttggacgtttctttattgaaggtatgcggactgatagtttaatgctcggaaatattcgcatttcacagttactttctgtagtgttttttgttagtgcattagtaatactaatagttcaacgtcataaaaacattccgtggtatgataacggaataaacaaaaattaattgaattggataaggagaaagaattatggcagaaaaaattgctgttttaggtgctggttcatggggcagtgttttagcaaacatgcttacagaaaatggtcacgatgttacattatggtctcgtaatgaggaacaagttaagcaattaaatactgaacatacaaatcctcgctatatgaaagattttgtttattctactaaattaacagcaacaacagacatgaaaaaatctgttaagggtgccagcgtgatactgattgtgattccaacaaagggtcttcgtgaggttgctaagaaattaaacacaattttgactgaattacaccaaaaaccgttaattattcacgcaacaaaaggcctagaacaaaatacatataagcggccatcagaaatgcttagtgaagatatttctcctgaaaatcgtcaggcaattgttgttttatcaggtccgagtcatgctgaagatgtggcaattaaagatatgacagctgtaactgcagcttgtgaggacctaactagtgctaaaaaggcgcagaagttatttagtaattcttatttccgtgtttatactaacgacgatgtaattggtgcggaatttggagcagccttaaagaatattattgcaattggtgctggagctatccaaggccttggctaccatgataatgcacgagcagctttgattactcgtgggcttgcagaaattcgtcggctgggggttgcttttggtgctaacccaatgacttttattggtctttctggtgttggtgaccttgttgttactgctaccagtaaaaattctcgaaattggcgtgctggctatcaattgggacaaggaaaaaagcttcaagatgtaattgataatatgggaatggttatcgagggggtctataccactaaggccgcttatgaattaagtcgtaaacggcaagtacagatgccaattaccgaagctctttaccgtgttttgtatgaaggtgaagatatcaaaactgcaatttctcagttaatggaccgagatcttacttcagaaaacgaataaatatggtaaaatactagaggatggatattgagagaaattgaaacatggaaagggttttacaagtatgaaacgtgttagaaaagccattattcctgctgctggtttaggaactcgttttcttcctgcaacaaaggcattggcaaaggaaatgttaccaattgttgataagccaacaattcaatttattgttgaagaagcgcgcaaatcaggaattgaagatattgttgttgttgatggaaagaataagcggtctattgaagaccactttgactctaatccagagctggaagataatcttcgttcaaagcacaaggacgagatgttaaagatggttgaagaaacaactgatgttaatatttacttcattcgtcaatctcacccacgtggtttaggggacgctgttttaactgctcgtgattttatcggggatgaaccgtttgttgttatgcttggggatgaccttaataacattaacaacaagaatgaagctttaacgaagcaattaattgaaagttataaccaaactggcgcatctactcttgcagttatgcgggttccacatgaagatactgcaaagtatggtgtaattaaccctagcaaggaagttacgccagggctttataacgtaactagcttcgttgaaaaaccagctcctaaagacgcaccaagtgatttagcaattattggtcggtatgtctttactccagaaatctttgatgtattagcaaagactaagccaggtaagggcggcgaaattcaattaactgatgcaattgatactttgaaccaaactcaacgggtattcgctcgtgaatacaagggtgaccgttacgatgttggtaataagttcggctgggttaagacaaacattgaatatggtttggaacacccacaagttaaagaagaattgcgtgaatacattaaggaattaggcgcaaagcttgctgctgaagataagcaaaataattctaagaagtaagactagcattggcctgtaaaaaataaaccttcaagattcgttatagggatcttgaaggtttattttttacatatcttcaacaactacatattccatatcaagtgggccgtgaacaccaacgattaacaccatttcaatatcaccagaattggatgggccggtaataaagttgatgtttgatgtttgtaaactaccatcctgaattgccttttgataataatccattgcttgccgtgaacgtggtaaaattttgctttttggcacaatagctaggtaatgagttggaagaaaatgaaacatccgtccttgttgtgggtaggtcgcaactgttacggtccctgactcagctaatagaaagtccgcaaagccaattgctccatcactgttatttgcatttacaatgttttgccgcccaaattcaggttcccaatagtaaataggatctactcgtaaattatcttgccatttccccaatgaataatcttgccatttttcttcatcaaaggagggaagcattaaacttttaatctccttttcttggataaaatcattaagagtgtggccaagatcggctgatttaacaacatggaaatcaacatgaacttcttcgctatttttgcgtgcaagttcaagaagttcatcttggctttttccagcaagggtagtttctggaagattattaacggggacaaatggattttcaccaagcgtatggcgaggacgattggcagcctttgcaattcgatttaagaagtcttcttgatttttagcggtgtttgcttcttgtaagtaatcagtcattttcttgctcctcctcttcttcgtaatgacgataccaatgccggaagttttggtggtactttggtggaacagcaagatcacgaacatctacccagccatgagctagtttaggagcaattgcgggaaggtggttaattttaccatctggataaaggttcttaatgtctttaggagttgtcttcttgccaaatggctcaagagcaatatgagcaaatcgcattgcatcattaaaaagcgtaggggagctcgtacctttaccaactgccttcaaaagagcattcgaaggactgtgatctaaatgaagttcatccatttctacataacggtgatgacggattaactcatgaaggggaattttaacaggacaagtttccgtgcaagcagcacataaactacatgcatatggcaattccttgaattcttgataaccgcctaaaatcggcgaaagaacttcacccattggtccaggataaatcgatccatatccctttccaccgacttgccggtaaacggggcaaacgtttaagcaagaaccacaacgaatacattgcagcattggttcaaagtcagtgttaagcatcttagaacgaccattatcgactattacaacatagaagtcatctggtccatctgcttcatccgcttctttaccttttgagaaagtacagtaactagttagtttttgaccaactgcacttcgacataaaacattgtcaaggacttctgcttctttcaaacttggcacaattcgttccatccccatgactacaacctgggttttaggaatggccatactaatatcggcatttccttcgttggtaacaaggttaatcattccattatcagcaatcgcaaagttacagccagtaatgccaaagtctgcttgcataaagtaattacggagatagtgacggacaaacctagccatatgttcaggatcattgtcaccgtcataaccaagcttttcaaatactttttgaatttgattgcggtttttatgcagcgtggggaaaacaatatgtgttggttcatcccaattatcttcttgcaaaataaattcagctaaatctgtttccattaatgaaagtccggggattgtgagtaattctttatccaatccaatttcagtagtcaccattgacttagatttaacaacatgatgaacgtttttcttgattgccaattgtttgataaaggcacttgcttcgttaccatccttggcaaagaaaacatgaccaccatttttttgaacattatcgctgaattcttcaaggtaatccgggagatgcttaatgacgtgttgacgaatttcagcagaaagatcacgccagccttcccagtgtcctaattgacgccgtgcttcagttcgtttttgaaattgagcgtcttgtgctttagcaaccgatgcccgcataaatttatcggcttctgcgtctttaattcgttcagtaaaaggcttatcgcttgtggctattcccatctaaaacaccccgtttccgtttgctggtaccattacatgatccgtatctttgacataagtgattcggctagtatcaacgttatgattaaggacctcagcaatgtgcataattgtaatatgagagccatcacggcgacggttaattcgtccaccaatattcattaaacatgtttgctcgcaagcaataagaatatgtgctttcgtcttcaaaacattatttgctttatcatcaaccatcgcttcagagagaaggggttctttagcagagaatgttccaccaaagccacaacataattgaatgttatgaaggggaataagctcaagtcctttaacatgttcaagtagaacgatgggggctgtccgttcaccaagaagacgggtcatgtggcaagaacggtgaaaggttgctgtatcatctagttctgcaccacaatcaagaataccgagaacccggtaaataaattgcgttagttcaaaagatttatcataaaggatttgcgctttcttcgaatactctggatcatctttgaaaatgttcttgtattcatgaagcatggcaacacatgatccagaaggcccaacaatataatcggcgtcaatacttaaaagggcatcgagttgatttttaaatgtagtaattgtttcacgatcataaccgctattataagttggttgtccgcagcaaatttgtttatcggggaaaaatgtttcgcagccaaaacgttggagaagttcaaccgttgcctttccgacatctggataaagcagatcaacaatacaagtagaaaaaatacagactttcatacatgcgtgcattaattggatgcacttcgcctccttaaaaatcgaaaaaatataattgcttatcataataagtataactcaaatatgataatattagagttgaaaacgatttaattatttgaaactaatatataaaatcataatattgattatagttcgacaagaatattactattaaaaagtaagcaaaatgatagacaaaaagatccaaagtctgtatgatatggatagtaaaaaaattgttcgaggaggaagagagaaatggctgaaaataagcaatatgatgttgtaatcatcggtgctgggccaggtggaatgaccgcagcgatgtatgcatcacgagcaaacctatctgtcttgatgcttgatcgtggaatttacggcggaaacttgaataatactgctgaaattgaaaattacacaggattcaagagtgtgaagggtcctgaacttgcccaacaaatgtatgaaggtgcaactcagtttggcgcagaatatgcttatggaacagtaactaaagtagaacttgatggtgacttaaagaagatcactactgacatggatgaaacatatactgcaaaggcggttgttatcgctactggctctgatcagcgccacctcaatgttccaggagaagaagaatttggtggccgtggtgtttcatactgtgcggtttgtgatggagccttctttaagggaaagcatttaatcgttgttggcggtggtgatgcagctgttgaagagggagtttacttaacgcaattagcctccaaagtaacagtgcttgttcgtcgtgatgagctccgggctgaaccaattattcaagcagaagcgatgaataatgacaagattgagtttgtttataacactagtgtgactgaaattgttggggatgatattaaagtaacaggtgttaaaactcataataataagactggtgaagatggtgaaatggctgcagatggtgtcttcatttatgttggtaatttcccaaagaccgctgcttttaagaatttagatattcttgatgatcaaggctgggtaaagactgatgagcgaatgcggacagcagtaccaggtatttttgccattggggacgttcgtgaaacaccattacgacaggttgcaacagctgttggtgatggagcgattgctggccagcaagtttatcaatacattaaatcgatggattaataaaaaggtgttagagaaaagctctagcatctttttttatttagtggtatagttttgattaaaatttagttagaaaaggagggcgattaccattggaaaatgatgaaaaaataaaactattacagaagttaattcagattgatacagtaaatggtaacgaaaaggacgaagcaagttatattaaaaggaccttagaagatcatcatatttcctgtgaattagttccttttgcacccaaccgcaccaatttaattgcggagattggtgatgaaaaggggccggtactcgctctttctggacatttagatacggtagctgcaggtgatttccaaaaatggacatatccaccatttgctggccaattagtagacggtaaaatctatggtcggggagcagttgatatgaagtcgggattggcagccatggtgggtgctttaattgagcttaaagaagcaggtttgccaaaacatggaaaggttcgcttgattgccactgttgatgaagaagttggtggtcaaggttctcttgaaatgactgataaagggtacgttcatgatgttgatgtgatggtaattggggaagcaactactggccaaattgaatatgctcactgtggctcttttgattatattgttgagtcttatggaaaattggctcatagttcgcaaccagaattgggaattaatgctgttacaaatctagtgaaatttatcaataaagaatcacgggcgtttgacgatgcagcagtaagtcccaccctaggaaaattaattcatagtgtgactgtctttcatggtggagagcagttaaattcaattcctgattacgcatatttgaaggggaatgttcgcacgattccagaatgtgataatcgggaaacaggaaaaagactacaatcaatcattgatgagttaaacaaggagacaggggttgaattaaaactaaagatagttgctagttttatgccagtggttacaaataagcaagatcgcttcattgcacttgctcaaacggcaattaaaaaggttagcggcaggcaaccggatgtagtgatttctcatggggcaacggatgcatcccgctatgttttagacaatcacaattttccaataattgaatacggaccagggattgaaaagttatcacaccaaattgatgaacgtattgcgcttgatgattatttaacggctcagcaagcttacgttgaaattgctaaacaatatttgaataatactaaagacgatgaacaggctagtagttaagcatgaccgtacagagactccagctggtggaaaaggagcttttatgctaatgaatcacacctgggagtaaagattttttgactgaaagaagaatccgggagtcacccgttatcacaaagagtttcgtcgcaaatgactgaacttaatgaggcagttgctgtgaggtagctgtgaaaaaaggtggcaccacgcatactaaatacgtcctttgaagatttattcttcagagggcgtttttttgataaaggagaagatacgtatgaagaaaaagataattaatttcggattagttttaatattgcttttacctttaattgtttttgcaagtggctttaagattcaaaatgagaattaccgggcaaaccacacagatacgtgggaaagaataaagaagcggggaacattacttatcggggttgatgatacctttgttccgatggattttcgaaaaaagaacggtcaattggttggttatgatgttgatttatctcgcgcagttgcgaaagttttaggattaaaagctgattttcagtcaattgattggtcaatgaaggaaaccgaattaaaaaatggcacaattgattgtatttggaacggttatacagctactccttcccgacaaaaacgaattgcatttagcagagtttatgagctatctggccaatcattggtggtacgaaaagatagtaaaattaaaaatttcgcggatatgaaaggaaagacgttgggaattcaagaaagctcaactgctcaaactgattttgacaaatatccccaagtattgaagaaactagttaaaggacagaagccaattctttatcaagataactcgagtgctttcatggatctgcaagcaggccgcacacaaggagtacttgccgggactgtctatgccggctattatgcgacccacattgcaaataataataattataaattgatttcagcatctgcttatcctgcagaccgggttgcgattggaatgaggaagggggaccggacgcttattaataaaattaactatgctcttggggttcttcaaaaagatggtaccttacgacggattaataaaaaatggctaggaattaatagtaattatctgggaccggttgctgaatttcaaaaatccaacaataatcgttaatgatttgttaaaattttatataacaaggactaaggaggttttttaatgggtgcaatcaaatgtaatgatacattagcggtgtcaattcatcggattcgtaattcagatttaaacgaacacgggacagtatacgggggacgaatcttggaattaattgatggtcaagcctcggtagcagcaatgcgagtagctcgaacaacagttgcaacagtatcaatggatgagatccaatttctgcgaccatttgaccttcaagattcaatgtgtatggaggcatacgttaccggctttgggaagcgatcaattgaagtatttacaaaagtaattggtgagcacttgatgaccggtgaacgtttcctcggcttttattgttttatgacttttgtaattcttgatcctgaaaaacaaacggcatttaataaattaattccggaaactgaagagcaaaagacgttaatggcaacatattctcaacgtgttaagcaacggcaaatccagcggcaaaaacagcaagaatttctgcctcatatttcaatttccaagccgtggtaaaactttagtaaatttttaagtaaaaagcgacagatagcattttatgcggtatactaaaaagcagagtatgacataaaggagacattattgtgagctggaaagatacttataaggtttggcaagaacgaacagatcttgaatcagacttaaagcaagaattagctgcaatgagcgacgataaagaaattgaagatgccttttacggtccattatcattcggaactgcaggaatgcggggactaatgggaccaggaattaaccggatgaatgtttacactgtccgtcaagcaactgaaggtttggcaactttaatggattcattgggtgatgatattaaaaaacgaggagtcgctattggttacgattctcggcacaactcccgtaaatttgctcatgatgctgctcgtgtattaggtgctcatgggattaaggtttacatctatgataatttacgcccaacgcctgaattgtcatttgcagttcgtcacatggggacttatgcgggaatcatgattaccgctagtcataaccctaaggaatacaatggttacaagatttacggtgaagatggcggacagatgccacctaaagaatctgacatgatgacaggttacatccgtaagattgatgatatttttgacattgctttagctgatgaacaagaaatgcttgacaatggtttggaaacaatcatgggtgaagatgttgatgctgcataccttgctaatgctaagggtgtaactgttaaccctgaattagccaaggaatacggtaaagatatgaaatttgtctttaccccattatgtggaactggccgaatgcttggtgaacgggcattgcgtcaagctggttttacaaattatgaaatggaaccaactgaagcacaaccaaatggtgatttccctggtttggaacatcctaatccagaattcccagaagcatttgttcgttccattgcccttggcaaaaaagttgatgcagatgtgttgatcgccacggaccctgatgctgaccggcttggatgtgcagttcgtcaaccagatggtgaatatcaattgctaactggtaatcaaattgcttctatcatgcttgcctacattcttgaagcgcataaacaagcgggaaccttaccaaagaatgctgctgcggtaaaatcaattgtttctactaacttcgctgctaagatcgcagaaagttacggcgttgagatgatcaatgttttaactggtttcaagtggatcgctgaccaaattcatcaatatgagactggcaaagctgatcatacctttatgtttggttttgaagaaagttatggttaccttattaagccatttgttcgtgacaaggatgctatccaatccttaactttacttgctgaggttgccgcttattaccgtagtcgtaacatgaccctttacgatggcttacaagaattgtttaagaagtacggctacttccgcgaaaagacaattgctaatacttatgctggtgttgatggcccagctaagattaaggctttaatgaagaagttcagagaagaagccccaactcattttgccggtcatcaagtagtagttactgaagacttcgctaatgggactaaaactacagctgatggcgaagtaagtgaattaggtatcccagaatcaaatgtattgcgttacattcttgatgatgatacttggattgctattcgtccatcgggaactgaaccaaagcttaagttctacattggtacaagtgctgataccttagataaggcaaatgaaaaattagctgatttcgaaaaggctttacaagagtttgctgaataataataactgagagactgttgaaaaaactttgcttttttcaacagtctctgtttttatatacgatattggggatgtcactaagattaaatttttcctcacctttcttgaaatttcgccaaaaaattgtatgattgtacaaattaattattttttgggaggacttcatcgtgggaatgcatgaatatctgaaaagtttaagcgacctcgaaatgattaaccgtgctccaggatattttaaatttgaggaacacaatgtggctgcccattcatttaaagtaacgcaagcagcacaaatgcttggtgatattgaagaacaagccggaaatgaaattgattggcgttctttatatgaaaaagctcttaatcatgactatacagagcgatttattggtgacatcaaaacaccggtaaagtatgctacccctgaattgcgctcaatgctggcgcgggttgataaatcattaacagaaaacttcattcaatctgaaattccggctgagttccgggcagcttatgaacgacgatttgcggaagggaaagatgatactttagaaggtaaaatcctcgcggttgctgataagattgatcttatgtatgaatcatttggtgagatccaaaaaggtaatcctgaaccagtttatatggatatttataagtcgagcttgacggcaattatggattttcgtgatatggctagtgtccagtatttccttaagaagattttaccagaattattaaaagataatgcagatggtaatgctaaaaaccaattagcaattattactacgcaaattattcaacaataatttatgcttttaggcttccttttatcaaatagttgatttttgaaaacgctttcttataatagaagtagaaggtaaaaattaacaaagtaaagggaggcggcaaggatgacaccaagtttatttgcaggaacatttgcaattttagtattgtggctaatcgttgatattatctgggaattgagtcgaccaagagacattgtaatgcggcgcctctgtgcttggcttaatcttattgcgattattggtggtttttctgtattttatggagtaacccattttgataatgctaatcttgttccgtggtttatttgtttgaattggattaatgttgttgccgcgggcttacaattttactttggttactttcggcataattaaatgataaataaaatattttaagaagtgagtgaaaatgggcttgtttggagagattgttttctactcacttttttactgtaaatttatagacgaatacatgtttgggtgataaactaataacagtaaataataaatagttagtgataagtgggatgcggtaatttatgaagttgcgattccactttattttatttaactgcgacgtaagggaggaatttcttttgatttaccggcaaccagataaaaaatttgaactagtgtcagagtacaaaccaaccggcgatcagccccaagcaattaatcaattgacaaaggggattgaagatggtgaaaaagctcaaatcttattaggagcaacaggaacaggaaaaacatttacaatctcaaatgtgattgccaatgttaataagccaactttgattctttcccataataaaactttagctggacagctctatggtgaaatgaaaaaattcttccctcacaatgcggttgaatattttgtttcctactatgactactatcaaccggaagcatatgttccatctagtgatacttatattgaaaaagatgcgtcaattaatgatgagattgataagctgcggcactctgccaccacttccttactggaacgaaatgatgtaattgtcgttgcctctgtttctagtatttttggattaggggatcctcgagaataccaaaatagtgttctttctttgcgcgttggtcaagagattgaacgtgatcgattgttgaccgaactggttaatattcaattcgatcgcaatgatattgattttcaacgggggcgtttccgcgttcgtggcgatgtagttgaaatctttccggcgtcgcgtgatgaacgagcattgcgaattgaattctttggggatgagattgatcggattcgtgaagttgatgcgctgacaggcgaagtgattggtgaccgggaccatgtttctatcttcccggctactcactttatgactaatgaagaagtcatggatcgggcattgccacaaattgaagctgatatgaagaaacaagtaaagaagtttactgatgagggaaagcttcttgaagcagagcgaattcaacaacggacaacttatgatattgaaatgatgcgtgagatgggctatacaaatggaattgagaattattcgcgttacatggatggtcgaaagcctggcgaacctccctataccttattagatttcttccctaaagatttcttattagttgttgatgaatcccaccaaaccatgccgcaagtacggggaatgtataacggggaccgagcgcggaaacaaatgttaattgattatgggttccgcttaccaagtgctcttgacaatcgaccattaaaactaccagaatttgaacaacatgttaatcaagttgtatatatgtctgcaaccccaggcccatatgaaatggaacagacagaccacgttgctcagcaaattattcgaccgactgggttacttgacccaacagttgaggttcgcccggtaatgggacagattgacgacctagttggtgaaattaacaaacgtattgagaaaaatgaacgtgtttttgttacgaccctgacgaaaaagatgtccgaagaccttactgattatctaaaagatatggggttaagggtcaaataccttcatagtgatattaagactcttgaacgaacgcaaatcattcgtgatctccgtcttggtaaatttgatgttcttgttggaattaacctcttgcgggaagggctagacgttccagaagtatccttggtcgccattcttgatgccgataaggaaggctttttacgtaatgaacgttcacttattcagacgattggtcgcgcggcccggaatgagaatggggcagtaattatgtatgctgataccgtgactgactcgatgcaaaaggcaatggatgaaacaaagcggcgacggacgattcagatgaaatacaatgaagaacatcatattacgccgcatacaatcatcaagccaattcaagaagcaattactgttactaagaaagcaacggatgaagctgaagcagataacagtgctgaatttactgacaaagattttgcaaagctagataaagaggcccaagcaaagatgctggatgaattaacagagcaaatgcgctctgctgctaaacgccttgactttgaacaggctgctacgcttcgtgatacgataatggaattaaagacaaaagcaaaaaaatagaggagggattatttcgtggcaaatgataagatcataattcatggggcacgggctcataacctaaaaaatattgatattactattccgaaaaacaagttagtcgttataactggcctatcgggttctggaaagagttctttagcttttgatacattatatgcagaaggacaacgacgctacgtggaaagtttatcggcttatgcgcggcaatttttaggccagatggataagccagatgtagattcgattgacgggttatctccagcaatttcaattgaccaaaaaacaacatcccataatccgcgttcaacggtcggaaccgtgactgaaattaacgattttctccgcttactatgggcacgggttggtacaccaatttgtccgaacgataatattccaattactagtcagtcaccagaacaaatggtggatcgggtactagaattgcctgaacggacacgtctgcaaattctttcgccggttgttcgtgataaaaagggaacacaaaagaaagtctttgaaacaattaagcgtgagggatttgtccgagttcaagtggatggcgaaacttatgaccttgattcagtccctgaattagataaaaataaaaaacatacggttaacgtcgtgattgatcgaatcatcatcaaagagggaattaggtcgcggttatttgactcctttgaatcagcgctccgcttaagcgatggttatgcaattgctgatgtgattggtggagatccaattccattttctgaacaatatgcttgtcctatttgtggctttacagttggtgaattagaaccacggttattctcctttaatgctcctactggtgcttgtccagaatgtgaagggttaggattgaagctcgaagtagatattgatttagtagtccctgaccgaacaaagaccttaaaagaaagggcgattgttccctggaatccaatctcatcgcaatactatccccaaatgttagaacaattctgcaagtcggttggcattgatatggatactcctttcaataagttgcctaaaaagcaacaacaacagattttgtacggtaatggtgaaacgccatttcacttccattatgagaatgactttggtggcattcgggatgtcgatgtgccatttgaaggtgttatcaataatattagccgacgataccgggagactaactcagattttacaagggaacaaatgagaaagtatatgactgagcttccatgtccagtttgtcatggttaccggctaaaccagcgggccttagcagtaaagattgatgggcgaaatatcggtgaagtttccgctttatcaattagtgattcccttgaattctttaagagcatcaaactttctgcacaaaaaaatgaaattgctaagccgattttaaaagaaatcattgatcgattaacctttatgaaaaatgttggtgttgaatatctaactttaagtcgctcagcacgaactctttcagggggagaagctcagcgaattcgattagcaacccaaattggttctaatttatcaggagtaatgtatgtccttgatgagccgtcaattggacttcatcaacgagataatgaccgtttgattgagtcgttaaaggctatgcgtgaccttggtaatacacttgttgttgtagaacatgatgaagatacaatgcgcgcggccgattacattgttgatattggccctggagctggtgaaaatggaggccaagtgatggcagccggaactcctaagcaaattatgcgatcacggaaatccttaactggccaatacttatcagggaaaaaatttattccagtacctcaagagcgtcgaggaggtaacggtaagaaaattactattacaggagcagcagaaaataacttaaaggatattacagttgattttccacttggtgagtttatttgcgtaacgggggtttctggttcagggaagtcaacccttgttaatatgattctcaaaagggtcttggcacaaaaattgaataataattcagcaaaacctggtaagtacaagtcgattagcggggtcgaaaatattgagaaagttatcaatattgatcaatcgccaattggtcgtactccacgaagtaaccctgcaacttatacgggagtctttgatgacatccgtgaattatttgcccaaaccaaccaagctaaaatgcgtggttatactaaggggcgttttagctttaatgttaagggtgggcgctgtgaagcctgccgcggggacggaattattaaaattgaaatgaacttcttgccagatgtttatgtgccatgtgaagtttgtcatggaacacgttataattctgaaacacttgaagttgaatacaagggcaagaatattgctgaggtccttaatatgactgtttcggaagctcttgaattctttagtgcgattccaaaaattaagcgcaaattgcaaactattgaagacgttgggctgggttatgttcaccttggtcaaccagcaactaccctttcaggtggggaagctcaacgaatgaaattagcagctgaacttcaccggcagtctcacggtaagagtttctatattttagatgaaccaactactggattgcacatggatgatatcaagcgcttattagctgtcctgcagcggttagtcgatgcgggaaatactgttttagtgattgaacatgatttagatgttgtgaaatcagcggactggttaattgaccttggccctgaaggaggagctggtggaggtaatgttgtcgctaccggaacaccagagcaagtagcagaagtaaagggaagctacactggtaaatatttaaaagagatgctcgaacgtgatcaaaaatgggcagaagaacgagaagccaagcaaaaaaagtagttgcaatctaattcttctaatggtattctaataaaaattaaagtacacgaaacgagggaaaagaaatgttattttttaataatcagaatcaacaattttcttcctcctcagcctctaacactattaaggctgagtgattttggtgtacccaatcaataggtttatacagactcgggttctctattaatcatttggcgtgaccaaattgcattaatagatgatacccgggtttttattttgcctaatattaagaatggaggaatgatgatgaatcaacaaccaacagatgaactaaaaaggtcgcttggattttggtccgctatttcgattgttgttgggacaattattggatcggggatattctttaaacaaggatctgttcttgatagtgctggtacatctacgcttgcaattgcagcctgggtatttggaggaattattactttaactggtggattaacagtggcggaaattggtgcccaaatgccatatacggggggattatatgtatatatcgaaaacttgtatgggcgccttttaggatttttagctggctggatgcaagtaattgtttatggaccagcaattattgcttcggttgccggattcatgagtattttaatggcaaacttctttggtttaggaacccagtggcgaatacctttagcagtgattacagtgattgccattggcgtaatgaacctttttgaaaataaagttggggcaattttttcgattgttacgactgccggaaaaatgattccaattgcggcaattattatctttggtttgttctgggggcatcaagatgcttttggtcaaacggttaccgaaattcaccaatcaactggtgggtttggggtagcagttttagcaaccttatttggttatgatggttggattttaatcgcaaaccttgggggagaaatgaaaaatccccaaaaattattgccacgagctatcattttagggattactgctgttcttattatttatactttaattactgttgggattcttaagttccttccagttaacactattcatcggctaggtgaaaatgcaactgcatacttagcggtgaaagcttttggcgcaattggaggaaaattgctgtcagccggaattattatttcgatgatggggactttgaacgggaaaatgattactttcccccggattgtatacgcaatggcgcgtcgtcatgatttgccattctcacgctatctcgcatatatcacgccaaagggtaagtcaccagtagtcgcaacgatgtttattatcattcttgcaacggttatgatgttcttctttgaccctgatcacttatcagatttgtgtgtgtttaccgtttattgtttctatcttttagcattctttgggatcttcattttaagatataagaataagggaccgcgcccattcagcacaccgctttaccccttagtgccaattattgcgattgctggtggaatctttgtcctcgtaagtgaagttatgaatgatcctgctggtgtaattctttttattggaatcgtcatcgtaggattaccaatcttatatattgttaaacgaatggatcaacgacggatgcattaatatttaaggctgagtttgacttggccttttttgttgctcaaataagacacacccggcttgatgtgataaaatagttgggtagctgtatgcgaaaagaggaactagtgatggtagataaaaaattaaaagtagtaattattacagggatgagtggtgcggggaaaaccgttgccgttcatagcttagaagatttaggatatttcgtaattgataacatgcttcctggattggcagaacgttttgttgatgtgatagaagattcgagagagtttgataaaatcgccatggtaatggatatgcgttcacgcggattttacgatgaggttttaccaaactttgaaaaactgaaaaaacgggctgatttagatgtgaaactactcttcttagatgctaatgatgtcacgttaatttcacgttataaggaaacaagacgttctcatcctttatctccgcaaggtcgaattcttgatggggtagaattagaacggaagctttcaactgatcttaaaagtcaagcagatatagtaattgataccactaatgtgacaccacgaaatctaaagttaaggcttaataaattattcggacaaggtgaaggcaatgacttttatgttgaagtaatgtcatttgggtttaaatatgggttgccacttgatgcagatatcgtaatggatgttcgtttcctccctaatccattctatattccagaattaaagcacttaacggggaatgatccagctgttcaaaattatgttgtgcagagtccactggctaaagaattttaccagcatttacggtcgctcttagagattgctcttccgggttacattaaggagggaaagagcagcctgaccattgcaattgggtgtacgggcggtcaacaccggtccgtaactattgctaacaaattatctgctgatttaaaagaaaagggatataaagtaaatacttaccatcgcgatattgagaaggcaaagtaaagaggagttttaattatgttgcataaaccaaagattgtagtgattggcggaggaactggtctaccggttgtccttcgtggattgcgcgatcaaaatgttgatgttacggcagtcgtaacagtagctgatgatggtggttcttcaggaattttacgaaactatattaacgtggttccacctggtgatattagaaacggtttagttgcgttatcagaattacctgatctcgaacttgatatttttcaatatcgttttaagagtagtgaccagttctttgccgggcatgcgattggtaatttaattatttctgctttgtctgaaatgaagggtggtatttttaccgctgttcaagagttatcagaaatgatgaagattaatggacatatttatcctgttgctaatgagccgttgactttaaatgctgaatttacagacggtacaaagttaagtggtgaatcggaaataacggctgcccataagcaaattaaacgggtctgggtaacaccttctaaagataatgatgggcatcctgctcgtcctgtgtcagaggttataacagcaataaagaacgcagatcaaattgtccttggccctggaagcttatttactagcatcctgccaaacttgatgatttctgaagtagggcaagctgtttacgaaagtaaggctgaagttgtctatatttgcaatattatgacgcaaaaaggtgaaacggataactttacagatgctgatcatgttcgggtattaaaccatcaccttgggaagaattttattaatacggtcttagtcaatattcaacctgttccagaaaattatcttgattttcaggaatggaatgaaatttctcaaccagttaagcatgatttccaagggctacgagcacagcattgtcgtgtaattagttcaaattttctgcggctaaaagacaatggtgccttccatgatcgcgataaagttgtagcagaattaatgaatcgacttcaccaagttcacgagtagttaggagactgatgctagatgtcatatgcaagcgaagtaaagaaagaattaacgggaattactgttcatcgggataatgcaaaggcagaattgatggcccttattcggatgaacgggtcgattggcattgctgaccaccagttagttttgaatgttcagactgaaaacccggcaattgcgcgacgaatctattcacttttaaaacaattttacggggtagaaagtgaaatcgtggttcgtcgtaaaatgaaattaaaaaagaataaccaatatatagttcgcttacgctatcatgcacaacatgtcttagatgatcttggtattttacaaaattatcaaattaaagaacaagtacctgtagaattacttaaggatgaatggatggtccgttcatatctaagaggtgcgtttttagcggggggatcagtgaataatcctgaaacttctcgctaccacttggagatatactccctttatgaagaacataatgagatcattgctcagatgatgaacaagtttggtttgaatgctcaaacaaccgctcgccgtagtggttttatcgtttacttgaaagaagccgaaaaaattgcggattttatgtcattaattggtgcaactaattcaatgcttcaatttgagaatgttcgaattgtacgagatatgcggaattcagttaaccgattagtaaattgtgaaaatgctaacctgaataagattgcaaatgcgtcaacgcgccaaatcgaaaatattgaatttattgattcacgagtaggtcttaacagcttacctgataagttgcgggaaattgcagaaacgcgattagcccatcaagaggttagtctaaaagaattaggggaattggttcctggtggtccaatttccaagtcgggtgttaaccatcgtttacgtaaattgaatgcttatgctgatgagttgcgtgcatcgcaggttaaacaataaaaaacctttgaggggactgtgacataagttaagttactttcataaaaagcaaatacgcagtacaacaatggcctctaatgtccggcaaaaccgaacgttagaggcctattgttgcttgcgggggctcgaaaacgaagtcacaagtgacatctgtctcgctcccctcaaaggttttattttatcttctttaagtgaaatttatttcttatttatactttcgctaattagtgctaattcagctgctgcgcattcttgatctaattcgttccagttagcggtaacgttaaaaacgtttaatttatttactgacattataacatcctccttgaccttatacctttattctctttcatctacattttgtatcatactacaattggtctaaaaaattaaacattataatatcggcatttgaagaatacttttttaaataggtatagttatattgctgaaattaataatgtaatagcaaagttaatcgtttgtcaaagttagataaattgttaaattttggaaatggcattcacgggatagttgttttggattaagggagacttgctttttaaaacaatgaccggtataattggaacgttaattaatttacgtttaatattaaaggaggcaaagtaacatgcgtaaagcacacccatacggcgtacaaggccgtcgcccaatcgcttcaaagtacaagcgagcattaaaagaaaagaagatcgaagctattcgtaagtgggctaaggaaaagccagctgaagaaaagtaattcagtctataaaagctatgcaattcagtgcatagcttttattttttaataacgccgtttgtaaaattaagttagaaaaatagaaaagccatttgtggtagacttttgaatacccctaaacaaaagaaaggaaaccacaaatgacttacacccatcttaccacaaacgagctgacaatcatcgcccattctttcgtgcaaaagcttaaagcgtaccgagtggcccaaatgatcaaccgttgttccgaaaccgtttatcgcgtttatcgttacctggaaaccggtgccttaattgctgattatcaagatcactagcaacgttgtggccgaaaacgtactcagttgtcactggctgaactcacttatatcaacgacaaaattgcccaggggtggacgcctgataccattattgggcgcgctgagcgcccaattagttgtaaccagcgaactctttaccggatgtttgaacgtggccagttcggcttcgatgtccgttccttgccgatgcgaggtaagcggcacccgaatggctatgtcgagcgccgcgggaaggttggccaattggggcgaagtattcacgagcgtgccaaggactttccgcactatgccactgaatttgggcaccttgaagctgataccgtccaaggcaaaaagcaccaaggggcggtaatgaccctgaccgaacgctaatcgaaggtcgaaattgtactcaatgtgcacaaaaagacggctgatgcgattaaccaacacttaagtcagcggcttcggaaattctcgtggcacttcttcaaatcgattacctttgacaacggaaaagaattcgccggctggcgcgagattgccaatcaatttgaccttcacacttactttgccgaggttggtgctcccaatcaacgagggctgaacgaaaacaacaacggtcttttacgccgggatggcttaacgaaacagctagatttccgcaaccttcctgatgaattggtaacccaactgatgagtaagcgaaataacctgccccgtaaatcactaggctatcgaactccatatgaagtattcatgtcttacgtcactgatgagcaactattttctttctaacttaaattgacatttcgggatttaatggtggattatagaatgaagttagccacccagttggtggtaaataaaaaacgccattcggcgtgacatcaggtatcatattaagtgaaccaaacctatatgaaaggatgtccgtcaaatgacgcacttaaatgataccatgtctactagtttattgactactcataaaaagaatgctcatcttactaaagaagaacgtgtgatgattgcgactttaaagtcgcaaggactttccaatcgcgcaattggtcgccaattaggagttaatcatcaaacaattaataacgagctcaaccgtggtacggtccgccaacttcgtcgtcaaaaatctaatggtaagatttacgaatattcttactacatctatagttatgaagctggtcaggccacatatcttgaacatcaccgccattctggtcgtcgtcgcttatattattcttcaaagcaatttttacgattagctgatcagctaatgcttggtgagtttgacgaccaccattactccccacaagcggttatttataaggctcgagatttaatgaatgatggcaccctgatcccaaagtcggttgtaactttatatcaatggattaatgagggtgtgcttcgtacgtccaatttagacctctttgaaaagcctaaacgtaagcatcatcgaactcatccgcaagctaaaaggtgcttaggtcctaatattgctcaacgacctcaaactgcggaccaacggtccgaaattggccattgggaactagatacagttcagggacagaaaaacggtaatgacagtgttgtactagtaatgactgatcgcctttcacgagttaatatcacgagtaaaattgctggtaaaactgcgcatgcagtaaatcagttctttataaatttacgccagaaaatgggcacagatgcttactatcgcatctttaagacaataacctctgacaacggttcagaatttagtgagttaacacaagttcacgatcatgttttctatgctgatccgtattccccttgggaacgtggatccaatgagatcaataaccggtttctccgcaaggagattaccaaaggtgaagctataaataactatagtagtgctcagatcatagcgactaatgattggatgaatcactatccacgagctatgtttaatggacattcgtcaatggatatctatcgtaaggccttctaccaagagatatcacagctccatcaaccaataatcaattggtcagtattatttatttgagtccagtggctaacttattcttgaaatttaggttcgggatttaattaaatggtcaagaatattttgcaaaaaaagattaaataatagttaaaacatttgaccttttttgaccaatcgagtatagtattattatccgttagcatataagactaacgagtgctaatttattaaggaggccatattatgaatttagtacctactgtcattgagcaatcatctcgtggtgaacgtgcttatgacatctactcacggcttctgaaggaccgtatcattatgctctctggtccaattgaagacgaaatggcaaattcaattgttgcgcaacttttattccttgatgcgcaagactcaactaaagatatttatttatacattaattcacctggtggagttgttacctcaggaatggcaatttatgacaccatgaactttattaaggctgatgttcaaactattgtaatcggaatggctgcttcgatggccagtgtactagtatcatctggtgctaagggtaagcgttttggattaccacactcacaagttttgattcatcaaccatctggtggagctcaaggtcaacagactgaaatcgaaattgctgctactgaaattttgaagacacggaagatgcttaacggaatccttgctaagaattctggtcaacctatcgagaagattcaggctgatactgaacgtgatcattacttgacagcacaagaagcagtagattacggcttacttgatggtgtaatggaaaataattcaaaattaaagtaaagtgataattaaaaagatctccaattattcgattaatttcgaatgacggagatcttttttattatcaaaacgtgcgtggaaattaacagccttgtggcgactgtaatatcttaaaaatgaaaaaaggctgtcgaaaaaattcaacagccttataaaaatgcgccccccgagagtcgaactcggatctcgagaaccggaatctcacgtgcgatccattacactaagggcgcgtcaacaaatattatactatcttaaataagaatgaattgcaagcattatttgaaaattttaattaaaataacgcttacatcagaaaaatgttgtgattgaatagacaatttttttgaagatggtatcataagtatcgtaggagttgtattattgcttagaccttaccactgcgtcacttacaatggttgagagttgcgatgctgatgtaatgtgataaactaagcaagtacactaattatgttttttcctaaaggaggaatttgcagtatgactgtaaaaattggtattaacggttttggccgtattggtcgcttagcatttcgtcggattcacgaacttaacacaaatgatattgaagttgttgcaatcaacgatttgactactccttctatgttggcttacttacttaagtatgactcaactcatggtaagttcccaggtgaagttacatctactgatactggtattgttgttgatggtaaggaataccctgtatacgctgaacgcgatgctcgtaacattccttgggtaaagaacgatggtgttgactttgttcttgaatgtactggtttctacacttctgctgaaaagtcacaagcacacattgacgctggtgcaaagcgtgtattgatttcagcacctgctggtaacatcccaactgttgttcctggtgttaaccttgatactttgactaaggatgacattatcgtatcagctggttcatgtactactagctgcttggcaccaatggctaaggtcttaaatgacgaatttggtgttaaggttggtactatgactactatccacgcatttacttctactcaagctatccttgatggtcctcgtggtaagaagatgcgtaacaaccgtactgcaagtgtaaacactattcctcactcaagtggtgctgctaaggctattggtttagttattcctgaattaaacggtaagctttcaggtcacgcacaacgtgttggtgttgttgatggttcattaactgaacttgtttcaattttggacaagaaggttactgttgaccaaatcaacgatgctatgaagaaggctactaacccagcattcggttacactgaagatgaaattgtttcaactgatattatcggttcaacatacggttcagtattcgatccttcccaaactgaaattatggaaggtgacgatggttcacaattagttaagactgttgcttggtacgacaacgaatacggtttcactagcaacatgatccggactttacttcactttgctactctttaatttgaagtaaaattaaactaatttgattaaggtgggaggaggactactccgcccgcctttttttatcaagagaagaggagacataatacaatggctaaattaactgttgaagaccttcctttagaaggcaagaaagtattaatgcgtgttgactttaatgttccaattaaagacggcgttgttggtgacgacaatcgaattgttgcagctttaccaacaattaaatatgttattgaccatggtggtcgagcaatcttattctcacaccttggccgaattaaaaaagaagaagataagcctggactttcacttcgtccagttgcagaacgtctttctaacttactaaacaagccagtaacatttgttccagttactgaaggtaagcaattagaagatgctatcgacaacatgaagaatggtgatgttttacttgtccaaaacacccgttacgaagacgttaaggatggcgaatatgtaaagcgtgaatctggtaatgatcctgaattaggtaagtactgggcttctcttggtgatgtatttgtaaatgatgcttttggtacagctcaccgtaagcacgcttctaatgttggtattgctactaacatgccaggcaaagcagcagctggttacttgatggaaaaggaaatcaagttcttaggtgatgcagtagataatcctgaacgtccatttgttgccattcttggtggtgcaaaggtttctgataagattggtgttattgataaccttcttgacaaggcagacaagattattatcggtggtggaatggcttataccttctacgctgctaagggaatcaaggttggtaactcacttgttgaaaaagacaagattgacgttgctaagcaaatcttagacaaagctggcgataagcttgtattgccaattgataatgtagtagctgataagttcaacaatgatgctgatacaaaggttgttgaaggtgatattgacgacggttggatggctcttgatattggtcctaagtctgttgaagagttcaagaacgtattaaaagatgccaagactgttgtttggaatggaccaatgggtgtatttgaaatgccaaactttgctaagggtacgcttgaaattggtaaattccttggtacattaacagatgctacaacaattgttggtggaggagactcaactgctgcagttaaggaattgggtgttgctgataagcttactcacatttcaactggtggtggtgcatcattaacttaccttgaaggtaaagaattgcctggaattgccgcaatttctgacaaataattaatgtttaactactatttataattcttatataagaggctgagaaaacttttgcttttctcagcctcttaccgtatcttggtattaacaataaaatggtagataggagggtcaaataatgagagtaccgattattgctggcaattggaaaatgcataaggatgtacaagaagctgtctcttttatcgaaaaaataaaaaatcagcttccacctgccgaccaacttgaaacagcaattgctgctcctactctttgtttggtaccaatggttaaagcggctaaagaatctccgttaaaaataatggcagaaaactgctattataagaatgaaggagcctatactggtgaaacaagtccatatgctttataccaagcaggaatccatcatgtaattttaggccattctgaacgccgaacttactttaatgaaactgatgaattaattaataaaaaagtgaaagcagcattagtaaacgggttatgtccgattgtttgttgtgatgatactatgcgtcgacgagttgctggaaagaaagttcattgggtggtgagccgaattctcgctgatcttcatggattgaccaatgacgaaatttgtcatgttacggttgcttatgaacctagttgggcgattggaacaggcgagagtgctgatccagaacaagcggcggaaggttgttaccttattcgccagacgattagtgatatgtatggcgatgaagttgcaaataatgttcgaattctctatggaggaagtgtgacaacatctaatatcaatgcactaatggcaaaaaatgatattgatggtgttttagtcggagcggcgagcttaaatccagaaacatttttacaattagttcaccattaggcggttaaatgcttgtttttaattgtgtaaaataatacaatgttaagtggaattgctttccaaataaatgacagaggagagattcatcaaatgtcactcattacagatatttatgcacgtgaagtccttgattcgcgtggtaacccaacagttgaagcagaagtttacacagaagccggtggtgtaggccgcggtatcgttccttcaggtgcttcaactggtgaacacgaagctgttgaattacgtgacggcgacaagaaccgttttggcggtaagggtgttttaaaggctgtttcaaacgtaaacaacattattgctaaggaaatcgtagggatggaagttactgaccaaatcgctatcgataaggcaatgattaagttagacggtactccaaacaagggtaagttaggtgctaacgctattttagctgtttcattagctgctgctcgggctgctgctgacgaattacaagtacctctttacaactaccttggtggtttcaacgctcatgtattgccaacaccaatgatgaacgttattaacggtggtgctcactcagataacaaggttgacttccaagaattcatgattatgccagttggtgcaccaactgtacgtgaagctattcgttggggttcagaaactttccacgctttgaagaaggaattggaagctgctggtaaagtaacctctgttggtgacgaaggtggatttgctcctgactttgctaacaacgaagaaccattcgaatacttaatcaaggctattgaagatgctggttacaagccaggtaaggacattgccattgcctttgacgttgccgcttcagaattatggaacgacgaagacaagaagtacaagcttcgttggtcaactggtgaagaatacaccactgaagaatggattaactacttatccggtattattgaaaagtacccagtagtatctgttgaagacccaattgacgaaaacaactgggatgattgggtaactattactgataagttaggcaagaaggttcaacttgttggtgatgacttctttgtaactaacactgattacttgaagaagggtatccaaatgggtgctgctaactcaatcttaatcaagcttaaccaaattggtactttaactgaaactgttgaagctatcgaaatggctaaggaagctggttacactgccatcgtttcacaccgttctggtgaaactgaagacactactattgctgacttggttgttgctacaaacgccggacaaatcaagactggttctatgagccggactgaccgtcttgctaagtacaaccaattaatgcggattgaagatcaacttggtgatgttgctcaatacaagggtatccactcattctacaacttgagtcaacaagctcgtcaagacatcgaaaatcgttaattttaagcattagttaaaaatcaaaaggactatggagaaaattccatagttctttttagttacaaattatttaattaagattaaaaacgattacatcatttatattaaaaaataatgagaaagaagcgttggaatttagtataaaatataatataatctttaagagttaaatacaatgaaaggataatgatacacatgaaaaaatcggcaccagaacttaatcgttcgatgactgctggtcagatggaaatgatttcccttggtggagcgattggtgttggactgtttatgggatcaacatctacaatcaagtggaccgggccatctgttatcctcgcatatacgtttgtcggcttaattctatatattgttatgagagcgttaggagagatgatttacattaatcctggaacaggttcttttgcggattatgcaactgaatatgttcatccagtagctggataccttgctaaatgggctaacgtatttgagtatattgttgtaggaatgtctgaagtagtagcagcaactgaataccttaaatattggtggccacaccttcatacttgggtagctggaattgttattattattttcttggtcctcgctaatttagcgagtgcaaaagcatatgggtcgcttgaattttggtttgcgatgatcaaagttattactattatctttatgatcttacttggatttatgattatcttctttggctttggtaatggcggtcatccaaccggtttcagcaatctttggtctcatggtggatttttcactggtggctggagtggtttcttcttctcaatgtcaattatcgttggatcttatgaaggaatcgaattgctaggaatttctgccggggaagtagcaaatccgcaaaaagcaattgttaaatctgttaagtctgttttattccggattttaattttctacgttggcgcaatttttgtaattgtaacaatttatccttggaatgaattaagcagtgttggatcaccatttgtatctacttttgctaaggtcggaattacagctgcagcatcaatcattaactttgtggttttaaccgctgcattatcaggtgctaattcgggtatttacagttcaagtcggatgctgtttaagctatctcatgaaggggatgctcctaagatttttggtcgtctttcaaaacggatcgttcccgatgctgctatccttggtatttccggtggtattttgattggctttattattgatatgatttcggcaacttatagccattcaactgctgatatgttcgtggttgtcttcagttcttctgttttacccggaatgattccatggtttgtaattttactggcagaattacgtttccgtcgtaataataaagacttgatggttgatcatccattcaaattaccactatatccattttcaaattattttgcatttctcatgttgattgtgatcgttatctttatgtttattaatcctgacacacggatttcggttattgttggtgctgcagtattgattctagcagtcactgtataccttgttcggcatggttttaaaaacgaaaaagcataagataaataagaagctaggaaaaaatccctggcttctattttatttttaaattaatttcgtctcactaagctcatgtagtacaatggcatgtagacttttaataaattggagaagaacaatggagagtagaaaagaggtatttcatcgctataatcagttcaatcaactaattcgggcgatcattattggaatattgactggtttagtagttagtgtatttagactcataattcaacactttttacaattagtaacagcaagttttgcatattttcattctcatccattatggctaataccatggacaattggatcaattattttagcattattattaggatggttagctcaatcctatcctgatataaaagggtcggggattccacaggttgagggacagttgactaaccaatttgatgaaaaatggtggccagtgttatggcgaaaatttctcggcggagttttcgccattggatctggattatatctcggacgtgaaggaccatcaattcaacttggggcaacaattgggcaaggagtagaggaaaaggccaaagtagggcaccttaatcgccaaatagggatcgcaagtggagcagcagcaggattatctgcagcctttaatgcgccaatcgctgcgactatctttattttggaagaagtgtatcataatttttcaccggtaatttggttggcaacatttgtgagttcgctttgttctaatatggtttcgatgcagttttttggcttacgaccggttttgaatgttccttataatcatatgcttcctaataatctttattggcatttgatcgcgcttggtattttattaggtatcttagggcgtctttaccaaattgttattttgcatttgaatggttggacggcacggattcctaaactatctcctattgcttatccaattattccgtttttgctggttattcctatcgcctggtattttccaatcacgttgggcgggggaaatgaattaattattattttacgttccttgccattttctttagcgctttttgtggggctttttgtccttcgctttgtattttcaatgattagttatggttcgcaattaccgggtgggatatttttgccaattttaactcttggcgctattttaggcgcagtctattgtgcgttaatggtccgtttgggattaatgccagttcgatatttacctaattttattatctatggaatggcaggttattttgcatgtattagtaaggcgccatttactgctattttattaattactgaaatggttggctcacttgcgcacttaatgccattagccttggtagcagtagtagcttatcttgttgtggatgcgttacacggtgaaccagtatatacagcaatgtttaacgcctttattggaaataatccgcaaccagcacgccataaagaggatgttacgatgtcgattaccatttatgctggcgcccagttggatggttgtaaaattaaagattttccatggccaactgattgtattgtgatggttgtctatcggggagaagaaaagatcattccgaatggtcaaacaaagctgcaagctggcgatacgttaattttgcgggctaattcagcaactactagacaagtttaccatgagataagtcgggctgcgcattatgcacaaggatagcaatagaataataaatatgatatgataattaagataaaagcgtgaaagtattaggaggaaaaatccttgtataacacattaatgactttattcttaattgattgcgttgtattaattgcttgtgtaatgatgcagccagcaaaaaacgataatgatgcaatgtcagctttgacaggtggtgcgggtgacttattctcacgtcgtaaagcgcggggatttgaagctgttatgcagattgttacaacaatttgtggagcactcttctttattctggcattagcgatgatttacgtttcgtcacattaaatttaaagtgcctcctgaaattattgtgattccagggggcttttttgacgctacggttggagtgcaggggatgatgtagtgataacgtatactggtgagtcttttttctttccccatagtggacggcatggagttattttgcttcatgcatatacaggaaatacgaatgatgttcgaatgctgggacgtcagcttaactggcaaggatatacggttttcgcaccgcttttgcatggtcatggtggtgatccgcaaaaggtgctggaaagcaatggcccagatgattggtgggatgatacccggatggcaatttttcgtttacgagatgccggagttgatcaaattgcaatttttgggttatcgcttggtggtttacttgcaacaagagctcttgagaatgatccgcaattattaggtggtggtgtttttgcatccccaattaccacctggggacaatcgaatgttccggaatacttccctaaaattgcggcaaagtattatcgtcagcaaaaaatcaacccattaattactaaggaaaaggttgctaaattgactgaacgactcccccaacaactagcacaaattcaaacaatggcgcatcaaatttgtgaccaattagatcagattcatcagccattctttattgcacaaggaggcacagatgaaatgattgatccagcgtctggactgcaattaaaaacaaaattacaggagaatggggttgcagttgattaccattactacccaaccgctactcacttattaacagttaataccgctcatcgtcaactatttgccgatgtagaaaaatatttacaaaatttattcgaggtgccttctaatgacaacaaataatttaaaagaaaaaatattaacacatttaacagataatgcaggtgtgagttactcagcagaaaaacttgctcatcaattagggatggatgatgctgagcagtttacaccgatcgttcaatctcttgctcaattggaaagagagaaaaaggttcaagtaactgatcatggtgaattcgaagcagttattaaacagcaaccacttattggaactttccacggaaacgataaggggttcggttttgtagactatgaccctgatcttccagacatgtatattaatcctgatcatactttgcatgcattaaatggggaccagatagaagttaaagtattacgtccagcaaaagcaggtagtgatcagggtccagaaggtcaagtaacccggattgttgaacataaatatgaaaatgtagttggtgaatttaagcaagcgactatcggcgatgattacattggtgaaattttgcttaaagataagaaattatcgcagtatcatttctatgtaacggacaagggattaaaaccacttgacggccaagtagtaacagctactgttgagacttatcctagtgatgaggcaccggaagtaatgacgggtgccgttactgaagtgattggtgataaggatgagccgggtattgatattatgtcagtaatctatgctcacgacgtccctcatgaattccctaaagaagtgatggaacaagctaataagattccgcttcatgttctcccagaagaaaaaaagggtcgggtggatattactgaccaaccgcttgttaccattgatgcaattgaatcaaaagacctggatgatgcggtggtagcttggaagatggataatgggcactaccaccttggggttcatattgcggatgttactcactatgtaaagccaggtacaccgcttgatcaagaagcatttaagcgtggtacatctgtttatctaactgatcgggtagttccaatgcttcctaagcggctttctaatggaatttgctctttaaatcctaatgaagaacgtcttgctatgagttgcgaaatggaaattgatgagcaagggaaaattgttaatcaccgaatcttccaaagtgttatgaaatcacatgcccgaatgacttataaagcagttaataagattctggagtcgcatgatgctaaaacgatgaggcaatatgaagatctcgttccaatgtttgaaacaatgggggagattcacaaattactgcttaagaatcggaaaaaacgtggtgctattgactttgaagctcctgaagcaaagattattgtggatgaaaagggtcacccaactgatattcaactacgagatcggggactttctgaacggatgattgaatcctttatgttagctgctaatgaaacagttgctgaacactactttaaggaacacgttccattcctttaccggatccatgaaacaccagatagtgaacgtattaaatcatttgtggactttttagctgtgtttggaattgaggttcatggtgatattaagaatgttaaaccagggatgcttcaaaaagtattgaaggatgtggctggtactcctgaagagcaaatggttcaagtgatgatgttacgtagtatgcaacaagctaaatactcggatgaagagctaggtcactttggcttaggcgctaaatactacactcactttacttcaccaattcggcgataccctgatgatacggttcaccgtttgattaagtggtacgaagaacatggtaaaaacgaaccagctaaggaccattggcgtgataagcttccagaaattgctgaacatacttcggttaccgaacggcggggaattgataccgaacgtgatgttgatagtatgaagaaagccgaatacatggaagaccatgttggcgaaacctttgatgccgtcgtaagttcagtgatgaagtttggtttgttcgtcgaattgccaaatacagttgaagggttagttcatattagcgtcatgaatgatgattattatgaatattcagaaaaacacatggccttaattggacgaaactctcatcgaattttccaaatgggacaacctattaaggttaagttagttcgggcagataaagatcttcgtgaagttgattttgaaattgttaaccctgaagaagcaccaaagacaaagattcgggtcccacgtaatgatgaatatcggggtcgaggtcgtggccgcaaaggacgtgccaataataattcccgtcatgagaacactagcagtaatcattaccgtaatactcaaggaaaatggcgtcgaactcaccaagaaaatggtcgtcaaaataatcgtcaaataaatcggggacaaactcgtcaccacaataattcacgtgatcatgaaggcgtttgtcgccaccattaagagcggggagggatattatggcaaaaaaatcccatcaagaaaataatgacaatttaattgcacaaaataaaaaggcacgtcatgattattttgtcacggatactgttgaagcaggattagttttaacggggacggagataaaatctgttcgtgctcaccgggtgaatttgaaagatggatttgcccaagttcgtaacggtgaagcttggttaatgaatgtgcatattagtgagtatgataatgggacttacttcaatcaagatccattaagaaatcgcaagttgctattgcacaaaaaggaaatcaataagcttgtaggagctttacaggataagggagttacgcttattcccttgaaaatgtatattaaacacggctatgcaaaagttttattaggactagccaaaggtaaacaccagtacgataaacgtgaagcaattaagcgtcgtgaacaaaaccgtgaaattgaacgagttatgaaacattattaaaacgaaaagcctaggtgaaaatcacaaattttcacctaggcttttcactttaaaatctatttgtttctacgttctttacagtttaagtttaactgattgctaattgaaaatgacatgctggtattaagattaggggaacgcttcattaatcgtgctaataaaggttcttgttcacttcgtcgagcccaatggttaagaatactagcgattagaattgctaaaggttcatcttcttttttatttatctttaattcatgacaatatccgcttgatagtttaacgggttgaattgaaaaaactaagtgactaccggaaaaaacacggtaacggcttgttaatggtgaaccaacaacgatccagttaataccgcgtatataaataacctgttgaacaaatccaagacctttcccaattgttccaacgcgttgtcgattaacatataatgcgaatttgggtaacagtccaagagttaattgctttacttcagctaataaggctccatcaattgcatacaatgatagggcatcgtacctcattccccacttaccgacaagaagatagcacgatttaccattcttatcgcgaatgacggtcgttccatgtaaatcacttgaacgatcgcgaatatataattgtcgcactttgccaccaccattctttgataatctaccttttattttaccagcttcttagcaaatttggtgaagaaacttctaagttaaaaaacgcttccaatttatcccatgatgatgtttaattatgctaaaataataggcgaggtgctaataatcgtgaaacaattaattcataacgactggtgggaagttttaaagccccagtttgaaagtgcatattatgcgcaattgcataatttcctaaaagaagaatatacccatcaaacgatctatccagaaatgcatcatattttcgaagcatttgaatggactccttttagtaaggttaaagttgttatccttggtcaagatccttatcatggaccaaaccaagctcatgggtgtagtttttcagtactgcctggggtgccggtcccgccttcattacagaatatttacaaagaattgcaaagtgatttaggttgtataccggtaaatcacggctatttaaagaagtgggctgatcaaggcgtcctgttattaaattcggttttgacagtgcgagcagggcaagcatattctcaccgtggacatggctgggaacaattaacagatgcagcgattcatgctttatctgaacgtcctaaaccagttgtgttcatcttatggggacgggctgctcgaaataagaaacagttaattaatacgaagacaaatatcgttcttgaatcagctcacccgagtccattatctgctaaccgtggattctttgggtctcgaccattttctaaaacaaacgaagcacttcaggcaatgggagaacagccaattgattggcaactgcctgccaaaccaaattatcgttaaagatgtgattgttagtcacaactttaaaatgtttagtgaccataaggaggtacttgcattatggaattatttgatgagattgctgcaaagattaagggacaaaacaagaccattgtttttcctgaaggtgaagataagcggattttaggagctgctgtccgtttaaagaaagataatttagtagagccaattttacttggtgatgaagaagcgattaaagaagttgcaagtaaaaatggttttgatcttgctggccttcaaattatcgatccagcaacttatccagaagacgataagcaagcaatgtttgactcattaatgaaacggcgtaaaggaaagaatacccctgaagaaattcaaaagatgcttgaagatgtgagctactttggaacaatgcttgtttatatgggaaaggctgatggaatggtttctggtgctgttcattcaactggggcaactgttcggcctgcattacaaatcattaagactaagcctggtgcccatcgaattagtggagctttcctcatgattaaaggcgatcaacgttatatctttgctgattgtgcgattaatattgaattggatgccccaacaatggccgaagtggcaattcaaagtgcggaaacagcacgcttatttgaaattgatcctaaggttgcgcttcttagtttttcaactaagggttctgctaagggtgaaatggttaccaaggttgcggatgctgctaagctagttcatgaattagatcctgatttaccagctgatggtgagttacaatttgatgctgctgttgtcccatcagtaggtgaacttaaagcccctgattcaaaagttgctggtcatgctaatgtctttattttcccaagtctggaagcagggaatattggctacaagattgcacaacgatttggcggttttacagcagttggtcctatccttcaaggacttaacgcaccgattgcagatctttcacggggatgcagtgaggatgatgcttataaggttgcaatgattaccgcagcacaagcattgtaaatattgatgaaaaggaagtgggactaaaaactcgcaagcgagtttagtcccacttcctttgctttttaaacatgagatgggtacaataaggctagtattttaaacttggagagagtactatggagagcttaacgttaacgaatcgtgacgcaacaattgcccttggaaagaaaattggtcagcaattagttgccggggatgtgctagtcttagacggtgatttaggagcaggcaagactacttttaccaagggattggctgcagggttagaaattcctgatatcattaaaagtcctacttttacaattattcatgaataccaagatggccgtctccctttataccatatggatgcatatcgcttagaaaatgggggagcagaagacctcggacttgaagaatactttgatggtgatggagtttcagttgttgaatgggctgaatttgttgaagatgaattgccagctgactttttagctattcacttcaagcgaacaggtgatgataatactcgtattctggaatttgaaccccatggacagcattttgaccaaattgtaaaaagcgtggtgaaacaatggcagacgacatttcgataaagttagcaacgagtgaggatgccggggctgttttacaatttctacgggcaactgcaactgaaagtgacgcggtattagttccgcatttaaatgagattagtgaaaagacagaagcaaaaaatatcgatttaataaatcaatttgatgattgtgttattttacttgcgatgctcggcgaagagattgtggggatggttactgtaatggtattagatcatcaaccgacaaccggtgaattaggagtcgtggtacggaaaaagtattggcgaaacggaatcggtcgcttattagttgatgaagcagagtattggtttaatacttatagtagtttagaaaatttgatcctgacagtttttgaggataatattccggcaattaatctttatcagcaattacactttgttacaatagaaaaaacggttgagcagggtcgtaatgtcctgcaaatgcaatacgataataaaaaagaggaaacaatggaaaagtaagccattatttcccctttcttgtgcgcccggcatgggtattagctaggtggtgaaagtccgctatgggccgtagtagtcggaaccatgagctgaggacaagggtgtccaccgtgaggtggaatttgaaggaagtctaaggcaaagtactgcatcgatgaacaagaagtagctataaggctgaaattaactggataaggctgctagacaagttgaagtccaatactactcgaagttggtctcagtaaagctaacgatgacatggtacgaaagctaatattcttacccggggagatctggcctacacgtttccgacaagaggaataagtttaatttccacagaaacaagcggtgcagtgatgcagtgttgagtaagccagaagtcagccgaggtcatagtagtttgaataatcagatgaaggactgaacgacaataacttgtaacttatatcggagatgtaatcaggtgcgacaatcgcagaaaacagaacaacaagctgaccgcttgtcgaggataggtttggaaaaccgaaagtacacaagggcgcgtagtaccggttatggtgaaggtaaaggtatgagtgtcactatccaagacctggtcttagatcgcaataaccttaatcaggcttatttgcgagttaagagaaataaaggagcagcaggcgttgacgatatgacagtcaatgaccttctgccatatctcagagaaaataagacggaactgatcgctagtttgcgtgagggcaagtataaaccagctccagtcaaacgggtagaaattccgaagcctaatggtggagtaagaagacttggaataccaacggtggtggaccgaatggttcaacaagctgtagcccaaattcttacgcctatctttgagcgtgttttctctgataatagttttggcttccgtccccaccgtggggcccatgacgctattgcaaaagtagtagatctttataatcaaggctatcgaagagttgtcgacttagacctaaaagcctattttgataacgttaatcatgacttgatgattaagtatctccaacaatatattgatgacccatggacactaagattcattcgtaagtttctaactagcggagtcttagaccatgggcttttcgctaagagtgaaaaaggaaccccacaaggagggccattgtcaccactactggcgaacatctacctaaatgagttggacaaagagttgactagacgtggtcaccactttgtgcgctatgcggatgattgtaacatctatgttaaaagtcaacgagccggagaacgagtaatgcgaagcattacccagtttctagaaaagcgcttgaaagttaaagtgaacccagataaaaccaaagtcggtagcccgctacggttgaagtttcttggcttttcgctgggtgtagaccacaatggggcctacgcccgtccagctaaacaatcgcaacaacgagtaaagaaagcactgaagttattaactaaacgtaatcgtggaatatctctgacaagaatgtttgaagaaattcatcgaaaaatgcgtggttggcttcagtactactcaattgggaaactaactaactttattcaacgccttgacaagtggttgagggtccgaataaggcagtatatttggaagcaatggaaaaagtttaaaactaaggtaactaacttacagaagttggggctgtcccagcatgatgcatatgtcttcgctagtacccgcaagggctactggcgaactgcacatagtaagaccttgagctattctctaactaatagaaaactggaacaactcggacttatgaatatgtccaagacgctccagtcaattcaatgtgattaagttgtcgaaccgttgtatacggaaccgtacgtacggtggtgtgagaggtcgataatcgaactaatcaattatctcctactcgattgtacatatgtttattttttatgtaggacttgcataatgtttcgccagaaggatccctttgtttgctgtttactaacgtcttgtgttacctctacacatccgaggtatttattttgatcatcacgtaaggcgtaaaaagcaatatttacaggttgaccatgatgcttgatcataatgctaattgaatcacggtctccggtatgcatatcatgaagtacttgcttaacatggccttgactatgcccgggatgaacctcaagcacatgtttacctaagtctgcatccgttcgcttgaataaacgatgccgattagctgatgaccagcgaatgatatcattttcatcaatgaaatcgaattctacggggatggtttcaaaaatagtattaagttgttcaatacttagttttccacctttaagattaatatctgtcatgattatctcctttagccgattaaattaataaagggctgaatctgttgtggggtaaaatgcttgctttgataaagcagaatgttagcgcaagcctgggcatcatcaagagcattatggtggtgatgaaggtcaatatttaacgcgtcacaaacagtattaagtttataatttgttaatcctggaatcaactggcggcttgaagcaacggtatcgagcgtctggtaggcggggacttcgatattgtaatgttctaacgtattccttaaaacgctattatcaaatcgattattatgggcaataactaatttatcaggagtgtagaattggttgatatgttcccatacttctggaaaatcaggcgcattttggacgtcacgttcatgaataccgtggatctgtgtattacgccaaaagaatttagtatgaggattaattagggtgtaaaattcgtcggcaatttgtccattccgaacgattgtgagtgcgagcgaacatgcactgtaacgcttaccattagcagtttcaaagtccattgctataaaattcatcatacatcctccttgcaaaagtcgataattttattttacaatcaactaatcatttttcaaaacttttacttttgaaaaatgatacaatagctcttgaaagtaaatataaaaaaggaagaaatagagaatggctaatttgatgaacgaatttcctgatattgaaattaaacaagatgaaccattaatgaattacacctatactaaaacaggaggtccagctgactggttggcttttcccgaaacgattgaccaggtaaaaaaattggttgattatgttcgtgagcataaaatgggcttaacggttttaggaaacgccagtaatttgattgttggcgatggcggtatagatgatttaacaattattcttacgcggcttaataaaattgaagttcatgataataaggtaacggcacaggcaggagcatcttatattgcaacaaccgaggcagcccgtgatagtgaacttactggattagaatttgctgctggtattccgggcagtattggtggggctgtcttcatgaatgccggtgcatatggtggtgaaactaaaaatgttgtttctgaggctaccgtaatgcttcccgatggaacgatcaaacactttactaatgaagaattggactttggttatcggcatagcagtattcaagataataatggcgtcgtgttagatgctacgtttgctttggaaccgggtaagtatgatgatatcaaagcaaggatggacgacctaaatgaacggcgagaggctaagcagccattagatctcccatcttgtggaagtgtctttaaacggccagaaggatattatgccggaaagttgattcatgatgctggattgcaaggatatacttcaggtggagcgcaggtttcgactaagcatgccggctttatcgttaatattgaccatggaaccgcagcagactacgtaaatgttatccatcatgtccaaaagacagttaaagaaaaatttggtgttgatcttgaaaccgaagtaaggattatcggccggcaagattaaaaagataaagtgtaagtttattaaaagattattaataagcttgcacttttattattttaaagatagtgaagtgatgaatgaatttaacttaatagttaggtgccgttaaaaagggaaaaaataatttaattgatcttattatttgctaattatgaaaaaatctcacaaattgctcattgaaaaattattattatggatgaaaagcgattccaaaggattttgaagtataccgattcactgactgataaaaataactttgtaatcactttcaaaatatgataggatatttaagtctcatttttgaaaaaattcacaaagtaaggagtatatttatgagcaataatgtagttgttttaggaagtattaacgttgatactacttatcacgttgatcgcttccctcaacctggtgaaaccatttcagcagtaagtaagagttctgctcctggtggtaagggtgccaatcaagcagttgcagcagcccgctctggtgccaagacggcttttattggggcagttggttctgataaagaaggagcttacatgcttgaatcattggctgatgatcatattgatacacgccatatcatgactgataagttacatggcactggtagtgctgcgattactttagatgctaatggtcaaaatgacattatggtatatggcggtgctaatcaagcaatgaccactgatgttcttgcaggtattgatgatgttttagaagatgctgactttttaattagtcaatttgaaacaccacaagaagtggctttagatgcatttaagcaagctaaaaaatacggtgttactactcttttaaatccagcaccagctcatgagattttaccagagttattaaaatatacagatgttattacgcctaatgaaagtgaatgcgccttattaacaggtattgaaattactgatgaagaatcaatgttaaagagtgctgattacttccgtgaacggggagttaagcaccttttgattactttaggctcaaaaggagtattttactctacacctacagctcatggattagttccagcatttaaggttaaggcagttgatactacagcagctggtgatacattccttggtgcattaagttcacaattagaaaaggacttatcaaatgttgacaaggcacttgtctacgcacaacgagcatctagtttgactgtccaacaaatgggagcaatgccttctattccaaaccatgatgcggttataaaagcattagcagaaaattaaggagtactatcatgaagaaaacagggattattaattcagaagtttcagctgtcgtggctaatatgggacatatggattggttatcaattggtgatgccggaatgcccgttccatttggtactaagaagattgatttggctgttgataaggaattgccaagctttatggacgtattgaataatgttcttaaggaaatgaaggttcaaaagatttacttagctgaagaaatcaaggatcaaaatccagaacaacttgaaaatattaagaaggcattaccagatgttgagattgcatttatgcctcatagtgagcttaagaagagtcttgctaagacgcatgcctttattcggacaggggaaatgacgccatactcaaacattatccttgaatcaggcgtaacattttaatattaggggttagttttttatggaaaatgaagtaaaaaaagataagggacaaagttgggttcaactgtcagacggttatttaagtcggacaccaatgttccaatttgttattttatgtttaatcttcccattatggggagcagcggccagtcttaatgatattttgattacacaatttaagacggttttcaccttaaatgatactgcaacggcctttgttcaaagtgccttttacggtggttatttcttaatggcaattccggcttcaattcttattaagaagacatcatataagttagcaattcttattgggctattattttatattattggttgtggaatgtttttcccagcttcacatgttgctacttatagtatgtttttagttgctatttttgctattgctattggtttgagttttcttgaaactagttgtgatacgtatgcaacgatgtttggaccaaaagaaactgctaacaaacggttaaacgttgctaatgttttgattcctcttggtgatatcatgggaatcgttcttggtaagtaccttattttcggtgaaggtggaaacattgccgacaaggttgctaagatgtcaaaatctgaggcagaagcttacaatgaacacttgcttcaattgactttgcagccttataagtacatcttgattgttttaatcatcatctttatcgttttggcagttactaagatgcctcgcgctaaggccttctcaactggttctgaaactaaagaagaccaaccatcacttggcgaaactttcaactacttattccacaataagcggtacatgaaaggggttctctgtcagtttatttatgctggtatgcaaacgactgtatggtcattcactattcggttagcattacgccttgattctcatatttctgatgcagctgcttcaactttcatgatctatagttacatcgcttggttctttggtaagttagttgcaaactggttccttgaccgttactcaattactaaggtattaacttggttctcattacttggaacaatttcattagtaattacctttactgttcctaacatcacagcggtaattgcggcaatcgcaactagtttcttctttggaccagaatggccaacgatctatgctcatacccttgatcaaattcatgaaaagaagtacaccgaaactggtggtgcatttatcgttatgtccttaattggtggggcaattgttccaacaattcaaggacgggtatcagatttaactggttcaatgcagttatcattcattgtcccagcaatttgtttcgcacttatcactatttacttctggactgagcaccgttgggaaaaggctcatccaaatgaagtgcaagaacactaaaatttcccaggaaataaataaaggcccagcggttatttaatcagctgagcctttatttatttccaaaactttaaagtaatttttttctagattaagctaaacacgaaatgaaatgatataatatgaacgtgatttagaggatggtgaatgcgatgcaatttataatttcgcttctaacatggcagaatctgattcacttaattgatatcttagtaatttggtttttaatctacgagttattaatgttgattcgtggtacaagagctgtccaactatttcgtggtattctgatcattattttggttaagattgttagttggtatgttggtttaagtactgtttcgtgggtaatggaccagattatcaactggggtgttattgcaattgtcattatcttccagccagagattcggcgcggactggaacaccttggtcgaggaactttctttactcataatcaaacagcaaatgagaaagaagaagatatgattaagcaattagaccaagcgattcagtacatgtcaaagcgaagaattggtgctttaatgagtattcaaatgaagactggtctagaagagtatattgaaacaggtattccactcgatgctgatatttcaggggcattacttattaatacttttattcctaatacgcccttacatgatggagcagtgattataaaaaataatcggattgcagtagcggctgcttatcttcctttgtctgatagtaaattgattcctaaagaattagggacacgacatcgggctgctgtcggaattagtgaagtgacagatgcattaacaattgttatttcagaagaaaccggcgaagtttcaattacgaaagataatgaattaattcgaaacatgtcgcgagatgaatacctaaagttcttacgtgctcagttgtatacgcatgagcctcaacacgaaaacttggtaacagaactttatgctaagtttcaacgtaaaggaggtggccgtcatgggcaaggacactaaaggcttctttcgccggaaatggtttttgagaattatttcgttaatcctagcactctttctattcatgtatgtaaatgggagcaaaagcggcttccttcgtcaaaatactcggaataataaccagagtagtgctttaatgtcgaataaatccgttacccttcgaatgccccttgatgtaacaattgataataataagtatattgtcagcgggtatcctcaatatgttaaggttaaggtaaccggtccttccgcattggttacaactacctctaatactcaaaattttaaggtgtatgcggatttgtctgacttgactcctggtaaacaccgagtaaagttaaaaacgagtgggttaaattcagaattaacttctaaaattgagccacaatatattaatgttaatattcaaccacgcaagacgattacaatgaaagtaactattcgtttgagtactagagatttggataatggctataagcttggacgtccacatagtgatattcagactgtccaagttactggttcacgagatgaagttaataaagtaaatcgaattgttgcttttgtagcaattccgcacgatgcaaaggatagtattgcacgacaggtaacactacaagcaattgatcggaatggtcaaacacttaatgttgtgatttcaccaactactactaatgtttctattcctatttctgcgggttcacaaagcagcagttcaaatgatagttcatcaagtagtagtggtagtgaagagagtgaagaagcaaagagtaattcaagagcaacatcgcgaaatgactcttcagattcttcatctgaaacatcccaatcttcaagcagcataagtaatgaagattcaagttcaagtagtcgaaatcaataataaagatacacatagaggagaagtgaaatgaagttaaaatattttggaactgatggagttcgtggagttgcaaatcaagatttaagtccagaattggcgttccgtgttggtcgcgcaggtggatatgtccttactcggcactcggaacgaaaacaacctcaagtattagttgctcgtgatacacgaatttcaggtgaaatgctagaaaatgcattgattgctggattattatccgttggtattgaggttttacggctaggggttgtcactactcccggggttgcttaccttgttcgggcacaagaagctgatgctggagttatgattactgctagtcataacccaattaaatataacgggattaaatattttggtggtaatggatttaaattatccgatgaattggaatatgaaattgaacaattactagatgctgaagaagatacgttgccacgaccatctgatgcaggcttaggaacagttgctgattatcatgagggagcattaaagtacacttcattcttggaacaaactgtttcaagtgatcttgaaggattaaaagtggtagttgatgctgctaatggtgcaacaagtggctttatctctaatctttttgctgatatgaatgtggactttattccaattaatgatcaaccagatggcttaaatactaacctaaattgtggatcaactcacccagagagcctccaaaaagcggttgtggaaaataatgctgatcttggagtagcatttgatggtgatggtgaccgttgcattgctgttgataatgagggaaatattgttgacggtgataagattatgtatatctgtggtaagtacatggataagaagggattacttaagaaagatacagtagttacaactgtgatgagtaatctgggaatgtacaaagctttagaagcgcacaacttaaagagtgttaagactaaggttggtgaccggtatgttgttgaggaaatgctgaaaaatggttataaccttggtggtgaacaatcaggacatattattttcttagatcacaatacaactggggatggaatgcttaccgcactgcaactcttgtctgtagttaaagactctgggaagacactcgctgaattggcaaatgatgtaacaacttatccacaagagttattgaatattaaggtagcagataaaactactgcaatggaaaatcaaaaattaaaggaaattattgcgcaagtcgagaaggaaatgaacggggacggacgggttcttgttcgtcctagtggaactgaacctcttttgcgcattatggctgaagcagctacgccagaattagttcatgaatacgttgaacggatcggtgatgttgcccgcgcggaattagaagtagaataacttgagaagtgaaaaagcgaggctggaagaaaatttattcttctagtctcgctttttaatcttttaataaattttaaatcatatagaccaatctaataaaataattgacaagataatctaaaaactgtactatacaatacagttgattagatctagtgataatcactagttatctataccaattttatttaaaggatggaatttaattatgtgtggaattgttggagttacaggaactgacaagagtttgtcaattctaattgatggattaaagcgtcttgaatatcgtggatatgactctgcaggagtttatgttaatgatcaacaaggacatgattaccttgtaaagcggccaggtcggattgctaatctagaagcggctcttggagaagaagtccatggtttagccggtattggccatacccggtgggctactcatggtgaaccaaatgaagccaatgctcaccctcaatactctcaagacgaacggttctacttagttcataacggtgtaattgaaaattatgctgacttaaagaaagaatacttatctgacgttaaatttgttagtcaaactgatacagaagtaattgttcaattagttgataaatttgtagttgaatctggaatgtcaacagaagcagcccttcttaaggttcttcgtttaatcagcccagattcttcatatgcatttgtattgatggataaagaacaaccagatacattatttgttgctaaaaataagagtccattattagttgggattgctgatggttacaacatggttggttctgatgcaatgtcaatgattaaggaaactaatacctttatggaaatcggtgaccacgagttggtaatcgttaagccagatcacgttactgttaaagactttgatggtaatgagattgatcggccaacatttaaggttgatatggatgctaatgccgcagataaaggtgcttacccatactacatgttaaaggaaattgacgagcaaccagctgttatgcggaagttagttcaagaatactttggtgacaatgatgtagcacagattaatgaagagatgttaaaagatatggcagatgctgaccacctttacatcgttggtgccggtacaagttatcatgctggcttagtaggtgcgcgcatttttgaaaaactttgtggaattcctacatctgttcacatttcatcagaatttgcttatgagcaaccactcctttctaagaagccgttctttatcttcttaagtcaaagtggtgaaacagctgatagtcgggaagtactggttaatgttaataagcataactggccaagcttaacaattactaatgttgacaagtcaacgctttctcgtgaagcaacttacactgaattactttacgctggtccagaaattgccgtggcttcaacaaaagcctacactgcccaaattgctgtcgaagctattcttgctcaagcattaggcgtttacatggataagcaagcagctaaagactttgatgttaagcaccaattaggattagttgctaatggtatgcaatcaattactgatagtaagaagaaagtcgaagaaattgcttctcgttacctctctaaatctccaagcgccttctacattggccggggaatggattggtcagtttcacttgaagctgctttgaagttaaaggaaatttcatacgttcaagcggaaggttttgcatctggtgaattgaagcatggaacaattgctttaattgaagatcagactccagtgattggaatcattacccaagatcggactgctggtttaacacggagcaatcttgaagaaacgcaggctcgtggggccaatgcaattacaattgtttcacggcaccttgcaaaagaggacgatacattcgttcttcccgatgtcgatgaagtgttgacaccacttcttagcgtaattccagcacaattgttggcttactacactagtcttggtaagggacttgatgttgataagccacgtaacctcgcaaagtctgttacagttcaataaaaattataaaggaagttagagaagctttagttggtttctcaacttctttttatttttaaagtaatttgatattttctttagatttgtttaataaaagggttgacttacttttatggaaacgctaccatgatagttgcaaggtataaaataattaccttctaatcaattctctttctctcttatgccgatcatcgtcttttagacgatgatttttttatttaaactcgctataatgataagggttgaaaggggaagaacaacgtggaagaacaacacgaaacgttaacattaattgaggaaattacccgtaatgacggctcaaaatattatgaaattggtaatatggttcaaaatggccgtgcagaattagcagctgaacggaattttattaaagaggttcgtattttagaactaaatatccctcattctaaaaatattattaaatatgaacactttataaatactcactataagatgcaaaccgaagcaatggatcattgggaagaatggaaacgtcccccagagattgaagaggttgttcaaacgatcttgaaagaaaatcatattgggtaaaccaggaagctgagttatttggtagtactaaaaatggatataaaaatgtggaggttaggcaatgaagccaaattttaatccatcacaggggatgaagtcgcactatttcgttacagggatagacggcttacgaacattagctgtcttaggagttattatttatcacctattgcccaatgttttaatgggtggttatttaggagtgccgctttttctattagtctctggatattttgtaacctatcaatttagtcggcagcttaaatatggtagtcatattaatttagggcatttttatctaaaaaggtttcggagactatatccgacattaattgcgatgttaattttaacaacagcgtacattacattatttgcacgagagctactccataacattcgggcagtaattgttactaatttaacttggatatataattggtgggaaatcagtcatgggcagtcctactttgatcagtttggtggcgtttcaccttttacccatctttggacattaggggttgaagcgcaattttaccttttgtggcctttgattattacgttattgtttgcggtttttaaaaagctacagaatgtgcggcgggtagttttcatattagctgtattgtcagcaatagaaatggctcttctttacgatccggcaaatatcaaccgggtttattatggaaccgatacacgggccttttcacttttacttggctcatggttagggcttgcgtggccattaaatcgacttcggcctaatttacaggcaaatagtcgccggttacttaatattataggaattattgcaacagttttgaccattgttggttttttctcattgaatggacagtccgcctttacctaccgcgggggaatgtttctctatagttttattggaatgatattaatggctactatcattcacccaggtgcggggatgaacaagtggtttacaaatccggtttttcattgggttggccagcgttcttatgggatttatgtttatcaatatcccgttatggtcttttatgaacgagtaatcaaagtcggcaatcatccacttctcaatgcattagtagaaatcattattattttagtagtaagtgaagtttcttaccggttaattgaacgcccatttgctcagtatcagtggtcaaaattaccggctgatctccagcatgtgttagaaacgcatcactttagttggcaaagcggggctaaaatgatggtaagtgcattagttgttgttattgcatttatcggtttgtgccaaccaaaccgtgcaccaaagaaaacagcggttcaacaacggatagagcaaaaccaccaggctgctgaagaacacaataagaagattacaaagggggataatgttgcggaagctagtggtaatacttctaagcttcagaaacagtatgatttaacccctgcacaaataaaagcagcgcagaagttaaaggtaacggccatcggtgattcggtgatggctgatgccgcagatagtattcagaaattaatgccaaatacttatgttgatgcacaagttgggcgtcaaggttctgccactcctgatgttatcaaacaattaaagacagatgggcatttaaataagattgttgtcttgaatttgggaacgaacggccctatgacacaagatacgttagacgatattttaagtacgattggctctgggcaccagatctattgggtaactgctcatgttccaacaaagccatggcagcaaacggttaataacgaaattaaagatttagcaaagaagcataagaatatccatgtggtcgattggaataaggcaagtcaaggacactctgattggtttgcaagtgacaatgtgcatatgggaccaagtggaaatgatcattttgcacggctaatcgcaaaggagatcttgacaaaaaaataggaggttagtaatgacacacgaagatcaattattagacaaagctatcaatatttacttaacaggattaaagggcatcgaaagctttatttccgaaccagcgagtgaatataatttatcttttgaacaattcttgattttacgaaaaataattaaccatcctaatatcaaactaatggatattgccgagcaacggcaagtaacaaggagtgccgtctctcgccaattaaaagttctttttcaacaaaaatatgttgaacaaaaagctgatccagccgatcgacggcgaatgttcttagttgcaacaaaaaaaggcaaagatgctgaaagtgagatttggcaaaggattaatcaccgctttgccaattgggttcagatttatggtgaagatcgtgctgatcagtttttaacactttttgaagactttaatcaacaaataattcaggggaatatccgaaagaaggaataagaaaatgattaagatggttgcgctagacctagataatacgcttttaaatagtaataaagaaattagtcaacgtaatgaacatgtcctaaagcaattacatcaagagggaattaaggtagtgctttgtactggccgcccaatcaatgcaatttggccatatattgaacagcttggtttaactgattcagatgattacacagttacgtttaatggcggattagttattaataatgaatcacgtgaacatctttttgaattagggatgaaaaagagtgatttactgccactattttcttatgttaaacgaaaaaagattcccctcaatgttttagactttgaacgggtatacgaattaaatgattatccaggatctatttatcggacagtgttaaagaatattgaattccaatctttgccaatgagtgatgtgccggaaaaaacttatagtaaagctgtaatggcaatcacccctgaaaaattgtctactattataggagaacttccagctgatcttaaagcgcagtatcatgcagttcaatctcaaccaatgataatggaatttttacctaaaaaattaaataaggcggttggactgaaggcgctactagatcattttggggatgattttagtaatttgatgacatttggggatgctgataatgatcttgaaatgattgaagcagctgcccaaggaatcgtaatggaaaacgggcttcctaacgttaaagcagtggcaacagtaattacagatacaaacgataatgacggggttgcaaagtattgtgaacgttattttgcaacacttttgtaataaagattgttataaaaagtaaaataaagagtatttttggcgcaaatatgaattttttgctaaaaaaatactcttttttatgtataatttaatgacttttcaataaaagttatggggccctaaaagctaactagcacaaggacttacagattttataatcatattaattgacaacttatattacgaaatattacaaaaagtcaacggggagtagtaaatagaaatggtgctgttacagcttagtaatattaagagtgtaatatataaggtgttgaaacggaaaagataatttgttgaataataaaggatggttgtttaatttatgatttctaagaaaaactttgctaaagtatctgctactcttggtgcagtggccttaggtgttagtgcaacggctactgctgctaacgctgacactatttacaccgtacaaagtggtgacacactttcaggtatttcttacaaattcgcaaaagacaacagtatggttaatgatcttgctaagaagaacaacattcaagatattaacaagatttatgttggccaaaagttaatcatcaagagcgatggtgaaattcaagaatacaacgctcaaaacgcagctaatgcaaacgtcgctaataacaatactcaagctactcaacaacaagctgcacaagctcaaagtcaagctagccaaagctatacttcaaatgcttcaggttcagaagctgctgctaaggcttggattgccgctcgtgaatctggtggtaactacggtgctactaacggtcaatatattggtaagtaccaattatcagcatcataccttaacggtgactactcagcagctaaccaagaacgggttgctgaccaatacgttgcgagtcgttacggttcatggcaaaatgctcaggctcactggcaagctaacggctggtactaaaatttaaactgaattattaggacaaagtaaaacgagactaagaaggtaatcttcatagtctcgcttttttatacaaatgtggtataataggtgtacctcttatggggatgtttatggattcgacaggtataggtcgagtttcaattgcgtttcgaaggttgcgtcttcgtaaaaacgctcagttttaaattataactgcaaacaataattcaaactcttacgcatacgctgcctaacaagtagcgcgcgtagatccattccgggttcgtccatggtgcggcaatgggttttataattagtggactacgcttgttactcccgtttgaagtaataagaagagattaatcaagctagctaaccatagttgccctgatcaacggcgttttggttagtgaaatctaaatagttgagatatgaacgtagagattgaaatggcgatatgcttggacacgggttcgactcccgtcatctccactatagggttgcacccagtttcaaatagcttcaaaatgctgatataataagatttctcaaaatgtaagatttaaacaatttcattaaattgcatttaaatgttgtatgaaatgttgtacagaaattaaatatcatttaagcatgaccaccacagtaatatgtggtggatttttttattttaaaatttattgagttgttgctgcttatcatttttgaaattgattttggtagtgtaaagatattaaattgtaaaggatgatgaatacaatgcttagtgatatagacagttggcgagatcttgtagcagcgcgtgaagatgatgaagcagaggcaaaggcaatcatgcaagatgccaagtttgaagatggttttaatgaattacagaaaatagatgataaaattattaaattgtatcgagaattcaatttaaaattaaagtatttacaagataatccacctgctgatacttccatgttgcaatggaatgaattaaagggactaaagccatttcctgttaacgaatattaaacaattagcttgcactaaatgcaggcttttttatttaccgaacgtaattatctaagttttaacttagataatgaaggtgaggtttagcaactggagctatagcgaaaggcggtagttttgtcttatattacttctgatattagaagtaatctgtttgtttacttgacaggacaagtaaatgattgtctgcttctcttcatcagttgaaagagaagggtctgtttggttcattttcgacaaggaaaaacgaacttgctttatccagatttacaattaaatctggtcaattttgattcttttggtgagtcaaaagaatgttcaattataagtctcaaaacggttagtgtttgaacgaataattgaaccagcgtaggggtgaaggggagctgattaagcgcccctccaagaagtatattagctgtattacagctaatattaactacttgcaaattgatcatcaatgttatattattggtatagaccaataaatggtatagctataacatagatgatcaaaccgacgaattacgtgatttagtcaaccgataattaccaaaaggtataggttgaaaatcacttaaaatttttagaattttactggtaatgaggagggataaaatgtgaatacaaatatcaaacgtaatatgattcaagtacgcttaagtgataccgaaatgaaaaatttcgaagcaataaaatcaacgttaaacgaaaaaactaatgctgcaactttacgtgaactaatccaattagcaccattagttggaaagcaatcgcaagagcaagttaaacatttattgaatacctacgatgacttggaagctaaagttagcgcgttgctgtgggatagttcgaatgttacaaaaaatctaaatgaaattgctcatgctgctaatattgcgaagaataatgatccagcaaatgaagacacttggaattggattattcaacaattaaaggaaattttcttaagtattaaccaattaaatcaaataggtgagcagactaaaaagttcttgaaagaaggactggaaaataatggcaattcttaattcgacagcatgtaaatcttcttatggtcgattaacttacatttttaatcaatctgctcataatacaagtaagacgaatcaccgtgttttagcttgttcaggaactaatattaatatgttgcatactcctaatggccatttatcaacattacagtcgggagcttacttagaaaaacaatttcatcaaagtttaaagcgagcttataatccgaaacgaaagtatcaagctcaaagtattattattagcttctcaagtgaagagtttgatacttccgacctaaaacggcaagctactcaagcaatgcaattggtagaaggatacgtacatcaacattttagtgatgctcaaagcgtttcttgtgttcaatgcgatggtgatggtggaaaacttcatgttcatttattgattaatactgtaaagacaaatggtaaaacagtaccaacaaatcgcttctctgtctatcgaatgcggaggaatttcaatgaatatcttgaacgtaattttcaactagttaccggaagagaatggtctaattcatttaataaagcaagtacacgtaaggatgctaaaacaataattacgcggtcaagttgggaagaacagcttaagcagaccataaatcaggttaaacaggaagtacgtaatgttgttgactttattaatcgtttgtctactaaaggcattcagattaaagaacggggtaaaaagaagcaatggacttacacccagattatcccagataaaaatggtaagccaaagcttcatcgagtgcgtgcttattatcagcgtaaggataaagctgggcatgttttatctacgcgcggcttaggtcaagcttatacgagacaaggcttagacaattattggcgtcaacaactagaaaaagaacaggagattacacctgttaaaagtcattacagaaaggaagtaaaaacaaatgacagaaaagatgttcaaactgaacgagaagaactcattaaaattagaacactcgcccgagatgctcaggcagcagcaaacgaacgacagcgacgaatccagcttaatctccaaaaatcacgttccgccgatgctgaagagcggaaacaaagaactcaacctcaaactggatcagctacttcaagacggcgcgaccaaagccgatctaagtcaattagcaagcagcaacgatatgcagaaactacgcagcgacgtgtcaaaaagcagcaagaacgtgcaaaacgaactaacggaaaagatgtcggaccagacctctaaattgatagaagtcgctaagagtacacgtgatattgcttataacaatgggttgcaagcagatattacgaatactcgtcaattggttgatgcaatgcagaaacgacaagataccgctaatgtacatatgaatgaggtaacaagacaaaatgaagctatgaatgctgatttaaaacaaattggtcctgcaattgcgaaagtagttaaggctcaaaaccataatagtgaaattttaaataaggcgttgataaacggatttcatatccatactaatgaggttacagaatctgttgctaatgagtttaagaaacttactggatttacaatcaatgagtttttgcaaaacgaaattattaagcagattaatgttaatgtttatgaagcgaaaaaagcaaaattatcggtaattcaagcagcccaagtaactgaagaagtattacataaaattgcattattaattcaacgctttataagttttgtaagtgtattagtttttgaattagggctaataattgcatgtgccattatgcttcctggttggtggaaattaataggattaatagtgactactagtgcatctgcaattttaaattattatttgaagaggaggatggatactaatgggctataacctaaatatcgatactgacaatgaaggtgcattacaattagcgatgcagggccaacaaattccttcttgggtatatgaaaactctcagatagcccatgagaataagcgaattcgtttagtagctcttcaactcgaagctgtagaagaagcacaacaaaaacagcgaggacaattacaaaaacaagaaaaagagagtaaaaacaatcagcctaataataaacgtcaacgccatcaggtaaaaaagcaaaaagatgatttgttattcgaataaaaaaaagacctcccgtcataattgggaggtttttatttgttcttaagaagttctaatattattttacttaaatgttctgttttagaataatcgtaattttcaagcttattaattaatttcgttaactgtggtccacgatgagaattgttttccgtagccgcctgattagtcattagagaatccatcgatgtgccgagagcagttgccaatcttaaaagggtagtcgaactaacatcatttgatccaccacgctcaaggcgagaaataaaattaattgatagattgcttaactcagcaagttgttgttgggtcatgtttaattcatggcgacggttagcaatattttttcctaataattgttgcatagttaatctcacttatccttttaatattaggataaaagtaagtatgactatttagaacgttatttataagtgttgatagttgcatatatgcatttataattagttatttatgtgcaatgatattgacttatgtgtggatgaaaaatataataaaaaatgttaattgtaaatagcttcttttactattcaaagtgattagtaataaccatgtatttagggagatgttaaatacatataaatagaaaataaaggtcatatcgatttaggtttaattattagaaatttaatgcgcacataacaaatataattttgggggatattatgaatagaaaaaataccatccttaagtcaactttacttgctacatcagttgtaactattagtgcagttactaatgttacggttcatgctgatgacatggcatcaaaaacgcaaagccaaaatacaccggagaaacaaattgccaaaaagcaagataacaacaaccagcaactatctgctttaaagcaacagcaaagtaactctgaaaatgaagtggctaaacaaaatgctgataagttaactgaattacaagaaaataatgctgaaaaaattaagattttagatcagcaacttcaaaaccaaaaacaagttacccaacagactgctaatgatcaattagcggctaaaactaatacagttcgccaatccgaacagtcacaagccgttgctgaaaataatgcttaccaatctcaagtagatgctcaaactaaggctaacgatcaagccgttgctaaccaacaacaagcaaacgcccaagaattagctaacgccgctaagcacatcgttacccctgaacaaaagcaaagtcaaattgactctgccactaagaacactcaacaagccttaaaccaagctaagtctgatcatgacgctattgttaataagttaaacgatcaattaactaacgacctcaagcaaagcgctcaacaagaacaagcagctaagaacgatcttaagcaacctagccaagcagataagcaaaagcaacttgatgatgcgcaaaacgctgttaacaatgcacaaggtaaagccaatgacgcgcaaaacgccttaactaatgctaagaataccctaagtgctaaccaaagcgctttgacgcaagcacaagatggtcaaaaagaacatgtgactaacgctattaaattaccagctggttacattgatgcttggaaagaatatgttaacactaaagaaaaaaatgactatttagtaacagaaagtacttatccagacgtatttaagaagcttgaaacgctagataaagaagcattaaagaacaacgtatatcacactaattcagcagcagaaaaagtgccagtgaccttaaatgctaatggcactctttcacgagatgacattatcaaagccactcaatttgctgtttcattactaaacccaattcgtgaagcaattggcgttactccatacaagatcaccaacgcatctattgatgtcgctcaagatgttgctaacgaatatcgcaaggataactggaatacttgggaccacgcacacgataacgatgctctagatcgcgttgctaacaaatggaatattgaccttgtcggcgaatcatgggctggagacggatcatttggtcaagtcaaatggactccaaacaatggcgatacaaaattcatccacaactataataacctaacactaaatgatttatacaaaggtgtttatagttcaatcttatccttattgttccacgacgccgatcaaggttacggtcacgccactgacctattaggtgttcgtgccgctaattccgatttaaccgttgctggtgacaaccttggtgtaagctttgaatacggcaaggggatgaaggcttggggccaaaccaacgttggtggtttccacttcaactctatttctgacgcttcttccaagaacattcaacgtttagttaaggaaggctacgttgttgacgccgctgatccaaatgccaaagttaaccaaccaggctatcgtgatgaaatcgccattcctggtaacacatctcaaaagcaaatcgctgatttacaagctaagatcaaccaagcacaaaaccaaattgatcaattaaccaagactgctaacgcagctaaccaaacattaactgcggctaaagctaagttagctgatctgcaaaagagcaccactgatgctaaaaacagttatcaacaacaattagcagccattaacactaagtacagcgatcaaacaactaagcttaaggctgaccatgacgctaagatcaaggccgaaaatgacgcttaccaagctaaagttagtcaattaaacaatgaccttcaaactaagatcaacgctattaaggctcaacctgaaaacactgatcaattaaagacccaacttgaccaaaagctggcccaagttaagcaagatggtcaacacaagcttgatcaattaaagcaagctcacgaagctcgtttacaaaagattcaacaagacgctgaagatactttagcggcatacaaggctaacttagacaagaatgctcaaattaagattgctaaggctcaagctgatcacgatgcatcagttaaggctcttaacgataattatactcaacttaagaaccaattagatgctcagcaagctaagctcgttagtgatgaccaagctcaatacaatgctcttgctactaaacttgacggcgaattagctgccttaaagaaccaagtattgccaaagactagcgatcaccaaactgctcaaaacaagcaagttgttgctggtaacaccgataccgttgctttagatactactggtaagactactgttgtgttgcctagagtgactagtgatatcaatggagaaaaaccagagtcagttaaattcttaccgcaaactggtaacgaagagaactcgtttgcaattatcgcactaggtgctttcactgctatgtttggtatgaatttagcttcacggaagcgaaagttttagtttgaaatatagagggaattgatagcattgacagtagaagttgataatgattcatatttttatagcctattaaaagcacatgcagcagaggtagcgaaagagccaggaaagtcgccaagtcactacgcagcatacggtatgccaatcgatgtattacgacaaaatataacagaatatatgtattatggaaattctgaaaaaattgaaaaaaagatacaaacaaccatctcaaacatagcgtatactattcaacttttggaattttatattaatgctaagaatgaattatatttatcctatccaatggagagaatgttgaataaggaaattttaatcacttcctttgaaatccaagaagctctaatcagtataatgtttgacggatactataaggctaaaacggcgcaagaaagaattttaaagcttaaaaataagaaaaaattaagtgaagattttattaatgctttagacgatgaaagaaggtatcgtaataaagttcatttaactggaaaagaagataattctattcctgactataaaatttttgatgatactgaaatggttaataagtcaattaatttgttaaatgagctttttgaactaaaaatacatgatgatcaaaagatagtattaccaaatgttaaataataaatcagatatcaatccagataatggacagcccaatgtagactttaagtaataccataagcaagttcagctcaaaatagagaataatatgtgtttactaaagtagttgcgaaatataagactgaacatcattagaaaaaaagccctagttaacgggctttttaattttttaaaacccgaaatgtcaatttaagttagaaagaaagtagttgctcatcagtgacgtaggacatgaatacctcatatggagttcgatagcctagtgatttgcggggcaggttatttcgcttactcatcagttgggtcaccaattcatcaggaagattgcggaaatctagctgttttgttaagccgtcccggcgtaaaagaccgttgttgttttcgttcagccctcgttgattgggagcaccaacctcggcaaagtaagtgtgaaggtcaaattgattggcaatctcgcgccagccggcgaattcttttccgttgtcaaaggtaatcgatttgaagaagtgctgcgggaatttccgaagccactgacctaagtgttggttaatcgcatcagccgtcttttcgtgcacattgagtacaatttcgaccttcgattggcgttcggtcagggtcattaccgccccttggtgctttttgccttggacggtatcagcttcaaggtgtccaaattcagtggcatagtgcggaaagtccttggcacgctcgtgaatacttcgccccaattggccagccttcccgcggcgctcaatatagccattcgggtgccgcttacctcgcatgggcaaagcacggacatccaaaccgaactgcccccgttcaaacatccggtaaagagttcgccggttacaactaattgggcgctcagcgcgcccaataatggtgtcaggcgtccacccctgggcaattttgtcgttgatataagtaagttcagccagtgacaactgagtacgttttcggccacaacgttgcttattgcgcatatagtgatcttgataatcagcaattgaggcaccggtttccaggtaacgataaacgcgataaacggtttcggcgctacggttgatcatttgggccactcggtacgctttaagcttttgcacgaaagaatgggcgatgattgtcagctcgtttgtggtaagatgggtgtaagtcatttgtggtttcctttcttttgtttaggggtattcaaaagtctaccacaaatggcttttctatttttctaacttaattttacaaacggcgaaataataaatgacaacctttaagctcaatttcaaagtcgctactaatggtattaagactaagtatccagttaatatgatgtgattttataaatttattcaaagagtcgaaatatggtgctaattcagttagacttatttcgactcttcctgtaagacgtaattcatctatttgtgcatcgttaagttgataaccgcaagcaccttttatttcactaacaacagtattaacatgtttttctattacttgatttaattcgctcattacttatccctccgttaaatgtaagatattgagattaattacagtttgaatcgtcatttaagattaatgtgtaaaaacctaaaaggttattactaatatctgtagctttatacattgtccacacacgatcttcttgagaagtttctcgtaaataatttctaattttagcaatgtatggtttaatccgttcagcagtaaagaatagtaagccactatttaatagtgcttgttgctcactatctgttaatagaagacttgcttgcagttgcaagtcctcattaacctcttcaataatttcattcattgtttgcataataaaaaacctcctaaatttttgaattcataaatttttctgcgctgaaagcgcgaaactttagaagctatgtgtttattgttaaattattgacgtacattattgcgtacgttataattacggtataactataatgtgaaagaaggttaattaaatggataacattattacaccaactaatgcgcgaaaaaatttatataatctgattaagaaggtcaatttagatcataccccagtaacaatctcttcaagtaaaaaagaagaagatgctgttttaattagtaaaagcgattgggacgctattcaagaaacaatgtatttagaaaataatggagttggtgatgtagttcgtcaacgtgagaaagatgatagtggctttaccgatatagatgaaattgattgggataagttgtaatgtataaagttcaaattaagaattctgctaaatcagatctaaggaaaattaagcatagcaatttaaaaggaaattttaatagggtcatccaacagttaaaagaaaatccatatgaacctaatcaaggatttgaaaaattagagccaccaatggcgagaaagtattcacgaagaataaatgtccaacatcgtgtagtatatgtagttaatgataaagaaaaagtcgtttcaatttattcggcatggtctcattatgaataaaaaagagtaatgagcctgtttaactcattactcttagtagtaacattagcaaaaacacattttttaattagtcttgaattcggtaagttcttaaagtatcaataatgttttccctcaaaacgcatagtgggttaataaattgatctttgtttcgctttaatgcacgattgaatgatttgaattctttataacggtcttgaaataaatcattataaattagctttaagtcatattcatctgaatgctgtgctaaatagcgtaacatcactttttgaacatattcttttttataattttcaaggatttcaggataattcttaccttttaaatacgtatcatctttaacccacgatacatgtttctcaatccgttcaccatgatgataatcgcgtacagtttgatctaatcccataaactgtttagcgtatttttttcgaaagcttgggaagagagaacgataattctttaattcttttcgatacgtcattaactcttcgattgaggagaagggacgtgtcaaataataaccgaaatcactttggggtacaaagccaattggttgataagtgtcgtcgggactcaagttaagccatttagtctgtttccaagttttcatactaacatagcgcttattatcaattgagtgtttcatgtcgtttattgattgcattctaaaatcatcaactttaaatgtcacagtatccttttcgagtagtttaattagtcgatctgttgtccagctgttaggctgtaatccgactagcgctttaatatggttatcttctgtcatattgaaacgagtgcgaatgttgattagagcagcttcggtatatttttgattgtgattatgcgactttagctcaaaaaattgtccaccaaagttatttttgttaactatcacccagcggttatcaaaatagttttcacatttttgacgaataatttcttcattaagtaagttgttagaacagaagataaacccatcagtggtcagtgaaggaacgagactattcgggtatgtttgttcaaccaggtccatcaacgcattgacttgatatcgggcaattgacgtgtattgtgcagctgtaaaagggttagtattacggctgaaaggtacatacattgtgttgccacttaaaaagtctcgtgttccgccagaacctaacccttgggctgatttaccgtagccaccgtttcctaataacttatagaaaagctgaagggcgtcatattttcgatattcatcagatttagagtcaaatttatcacgttttgctttagcttcatttcgacaaattagtgaccaatgctgcatttttccgattggcgctagacaggcaacatgtccatccaatattttttgttcaggaataatgattcgatgaactctaacagtacctccgtgttcaacaatgttaataatatcagttacggtcatattaacatgatttgcttgccggacgtaaattggcccttgatcttttattaaaggcttatagccaaccggcacacgttttacattgtccggaaagtgataagaaacattagcaacaccgattgtaaaagctccatttacaaaatattgtgaatgtttacggtaattttttaaaatgttgctatctaagtcatgtacatctaaaattggtttacaatcaagcctaaaatctgggattaagtgaccagcatctacatagcttgatttgagatcaatatcatatttatatttaaacgcactcgtgataattccagggttaaaggctaaattcattccaccaacatacgcttctcgtgccatagcgaatccatcattatacacggaatcaggtcgaacgctaaattgatcatgactacctttcttatgttttttatcaactgtactagattcaataaaattataacctttccgcatttgatcaaaattcaattgggttgttaaaaaaatttcaggcgaccaagtaattacatctttgttattaaaccaagaaacagtactataaatagaagcgttatttaacttagttaggatattatcaatggttggaggtacattattacgtgtgtaattaaattgatgtgcatgatccgcatattgattacgtaacttagtgctgatcgcaaattttggcttactgactttgaccttctgatttatcaaattgcttacatcaaatttaggattatcttcgtataactttttaaagttaattcgatcggctaatatcgaaggtgatcctttttgatttttagcaggtgctgaaccaattagcttttgatagatatatcctttcttgcttttcttgtaagcaagtgtacctcgagcgagataaggttttagtttttcaataaatagtttttgaaattcaaaattatctgaaccatcaacagcatcgcttaaaactttaacccattctctcgtatctctgggtggttcttgattgtataattttggtcgtaaatatttatcaacatcaataccgcgaaaaatatcttggaaaatatttttaaccgtttttgaatcataaggttcttgagagtaatgagaactaatttcatctgctaaagatgttactgtcgcgggaatatgcacattttcaattaattcttcattatatacatcaattacatttcccataaaaaagtctaagtattttaaagtaacttctgaatcacctagagcatagtttaaataatcatcaggacgtttttctaataaagaacgcatgtgagatttataatagccaccgttataaggatcattgaattcttcaaaagaaattagtttatcctcaagatcccaatctttcgtgttaagtttcttttgatcaacaattgatcccaaggctgctaaacctccttgtggcccaaggggcattgtatcgacaaatttaatagttataggatacttgattcgtcgtgaattaggatttgtaaccatgattgaatatggattactaaagaattcttgcttgtttaaagcaataaaagttggttcattctttgactttccttgaatatctaaatatttttccaatcataataggcggtaatgtcaacacctgcaaagaagcctacatatacaaccggcggaactcgattcgatttattcaacttttctttaattttatcttcttttaaacctaattgtcgcgctagtcgtcgataatctccgtctgtatattcttcacagtaaccaacattattaagataatatcgaacaacgctaataagatcccagaagctgaatgatttgtctccaggttgacgataaattacaatccccatcgcagaatattcagcatattttattacgtattgatgactaataatatcgtcttgattacgatagtcagtatcattactatggctctgcgatgtgtcccattcgctgtcatcagcaataaacactgtgtcaagtccataatctttttttaatttagaaagattttgataatcatcaatcttataatttctaattttaaaagttcgtgttaatgtgttaacaccgctcaaatttatagcctccttatataactaaaggaagcaatactaaaaaccacactatactaaatagtgattagtacacacaatatttatatgttataattttttaaatactgaagtgagtttttaattggtaatgatacttcactttagtgtttttaatattttttgtttggagaattaatcaaatggcggtttggttaattcttttttgttattttgggtgaacacttttgttaatgttgttcacccaataaatgctctgctttcttactgtcacaacgattacggtagggtgtcaagcgggttctttatgggagagtccccagaggtgctaccttttgacactaattcattattaatgataattgctaatccatttaccattccaagctttatttggaaggcgattatgaataccggctaaataaatttgcttggttgtgggtcgcacatgatgcgaacgataatacttaattaacaacccggttagtgatttattagggtcaacttctcgttgaaaaatattacctggcaaattttgaggaaggcgattataaaacggtggacaacagataacatcagcgatctcgaactttatctgataaaacagagcttgaagcaaataattattactgatatttaagctttttgccactaaactaaagtcattttgatcacttcgatctcgcttgtttttgttaaaccaaagcaagaaatctcctggaatgagagatgaagctaaaggatgcaattgactgcgataccaccacgaatcatgcggaacatagtcaatttgtagtttactccgctcaattgttttattagatgaagaaaaagtataattcaaatattgtttatgatgatgctttgagatacctttttctacatctacattaattaatgttaattggctttggggctgcgtgaataaagagttgttcagactaacgctttgtagtaatcgtgtgtaagttgctgctgtaacttgtgacggttgatgtattgctagctcactaatttttaagtttaacgctgtcattaacgaattgagcgattttagtgcttcagttttttgctcttcatgtgatgcgttaatcataagatcacatgtcttaaaattttcactaatttgaagtaatttgcgatgcgaagatgctaatgtgagtttgattccaaaatttgggtaaatcacttgtgcatcaactaaaattaagtctttaatagactctgtaagtttactttccaaaagcactcacttcctttttgaaaatgacttatagtaatcgatataatcatcaatcgcccagctaaccagctgattaatggaccgaggtggtttacaaccaggccaaaattgcatgtcaaacaacattttttgtacaatagcttctttgttctcgtccaaattaataatgtaattaataataaacactcctcgatgttttccttgctattaattaatctttagaagtcataaacttatcaagttcatatcgattgaagcgataagttttgccaaatttggtatatggaatgttagtagtagcaatccattggtcaagcgtattaggagctatatttagatacttagcagcttcagactttgacatataaggtggatattggctagtaagtgctcgtttgcttgcctcttcaattgcttgagtaactgcatatttgattgaattagctaagaaatcaggtaattcaactttgatttttgacatttaatcatctcctctcttctcctctttggttaaaataaagttaactaaagaggagaataatatgcaattctagccaaaattaagtaaactaaattttaaccgaattgcttgacgcaatattacaatattactaaaataaaatcaagtaaaattaaatagatttcttttttattcttagttcgcaatggaggtaaattgcgtattatcaactaaaaatagcgattacgattttttttgaggaatatgaagtgaactttgagatatataataaaatagcaattatatcgaatttagatttataacgtaaaaaggtggtatttatgtataatcgggttgcattaggagctagaattaaagttgttagacaaaaaagaggtgaaactcaaactgagtttggaaaaaaatttttgccacctgttagtaaagttgccgtttcaaaatgggaacgcggaattacaaaaccaactgcacagcgtttgcgtgaaattgcgaaacttggtaatgtgacagttgaatttcttattaatggcgacaatacgactgccgaggaagcgcaaaagttgttaaataaagtcattagccgatcacgatctactaatgaagaagataagaaaagattgaacggtattcaactggaattaagacaaaagcttaaatctcatgacgatgctgaaaaaatagcaggtgttaacaaaaaaactcatttattaaatgatctggaatcagaaattcatgttcttgatgaagatttagattattcaagtttagtaacatttgatcaattttttaagctttttaattttctaagtagtattaaaaatccttcaattttaaaagaatttaatgagattctttggcatattaatcaaattgctgaaggaaacgaaatttacgataaagaaagagatttattaaagatagataatttcttgacaaaattaagtatgtctaattagactgatagatataatgtaattcacttctcgatgtttcccttgctcaatcatgcttaaatgatgtacgcagaaagagagtgaaattacatggaaccttatgggtataatacaaaaaagggtaaacgttatcgggtagcttaccgaactccagataataaacaacataataagggtggttttactactaaacgtgaggcacgagcttggtatcgtcaaaaaatggtcgaaattgagaaccatggctttagtagtaatggaaaggtaacgtttgaagaagttgctaatcggtggcttgataataagaagcagacagtagctggctcaacctataaaaaatatgaaacggaatgtaataaacatttaatacctgctctgggtgataaattacttaaagatatcagtattcctacttgtcaatctttagtttatcaatgggctaaagatttcaaattttataataaaatggtcaatgatgccgcaagtatttttgatctaggtattaaatacaaattgatccatgataatccttttaaattaatagagcatccaaaaaaagataaggatgatgaaagaaaagtaagatcatttaccaaagatgagttcattacttttaaaaaaggattgcatgagcattatgaatcaacaaattataaggcgtttgctttcctttttatcttgtcacatacgggattacgaaaaggtgaacttctagctttaacatggaacgatattgaccttaaaggtggattccttcatataaaaagaggtgttacccgtgatactaaaaataatcttataataggtggaacaaagaatatttattctgtacgtgatgtacctattgggccagaaactattaaagtgttggaaaaatggcgttctgagcaatatcaagaactgaaattttttaatattaatacttttaaaccaaatcaattagtatttacaggcgaaaaaggtggtatattgtcaccgtcgaaacctggaaaatggctaaatgtaattgagaaaaagtataatcttccctcttatgtaacgccgcatggactgaggcatacatacactagtttactaattgaagatggaatgtcggtcaatgatgttgctagtgtgttagggcataaagatgctacaattactataaaagtttataatgatttacatccgattaaagataattcgatcggtaaaattattgagaatctttaaaaactaaaatgttgtagagatgttgtataattaacatctaacaacataaaatagttgatatagcagcctttgggggacacgggttcgactcccgtcatctccactatatgcctataaggactgccattggtttatggcagtcttttttaatactaaatattgggataattagtggggtttcataagaagatattctcatgtaaaaattagtaaataaagttcagataaaatataaaggaatgaattaaatggaaatattaatgattgaggataatcattctgtctgtgaaatgatggcaatgttttttaagaaagaaaaatggcactatgaatttgcttatgatggcgtggaagcagaagaaaagtttaacgctgaccctcataaatgggatattattttgctagaccttaatcttcctaaaaaggatggaatgcaggttgcagctgatgttcgacgggtatcaccaacagttcctttaattatgttaacagctcgtgatactgaaagtgatcaggtattgggattggaaattggtgctgatgattatgtaaccaaaccatttagtacgattactttaattgcgcggatcaaggccctttatcggcgaacacatttaaacaaacttgaggatgttcaagatactgatagtgatgatacattcgatattcaaacaaagaactttaagatgaatactaagacaagagaagtattcttatatggaaaaccggtcggtgacttgacacctaaagaatttgacttattaaagacgcttgcctctaaaccacgtcaagtattcacccgttcacaacttttacaattagtatgggattatgaatattatggtgatgagcgaactgttgatgctcatattaaaaagttacggcaaaagttagaaaatattggacctcaagtaattaagactgtatggggggtcggctataagtttgatgacgagggtaacgactaatgaaattaatgtatcggttgatgctttcattttttgcgattattctgacgctaatggtgattgttagtatttcgtttataaatgtaactaataacactatgtatcataatacgtggcaacaattgaaaagttattctgatagtttaattcaggattctattcgttacaatatggcaacccaaagttttgaagggtttgctacagaatcgttaaatagcaatgccaatcttttaacacggcaaaatgttcactttgcaatttatgatacaactcaccggaaaatttttgccagtaacggctttgctcctagtatgagtaaaaatgattggaaaaagttaagaaagggagaaactgtttgtactaaactaattactcctaaaattaattcacgagtatcaaaaggtgtttctccacgaatgaccgaagtttcacgaccatacttctataaaggaaagatgattgcggtagtttcgattgcaactttcgtctcgacaattgagcaaaatatgcaccaaataaagattaacttaataatggcactactgactgctagtcttgtaacgcttgcagttagttacttcttggcacggtcaattaccaaacgaattgatcgattgcggatggctactcaccaaattgcgcaaggaaattacaatgttgaagtggacgataatgggcgtgatgaagtggcagacctcggtcggagttttaaccaaatgaccgcttcgttacgtgaatcgcaacaagaaattcgccggcaagaggagcgaagacgccaatttatggccaatgcagcccatgaaatgcggacgccattaacaaccattaatggaattcttgaagggttacagtatgatgcgattccagaagaggataaaaagcatagtatccagttaatgcaaaatgatacgcggcgtttaattcgcttggtcaatgataatttggattatgaaaagattcgcactaaccaaattgcgatggaacggaaagtatttgatgcatcggcagtactcgaaaatttacgagagcagttagcgaaaaaggcaaaagagaaaaaggatactctgcacttggatgtagaaaagaatttacgggtatatgcagactatgatcggtttgtacagattatgttcaatatcattcaaaacgcaatccaattcactgataacggaattattgacattcggggaaaacgtgtggaaaagggaagtcaatttgtagttcaagataatggaattgggatgactcctgaacaacttgaaaatatctgggaacgatactataaagctgatcgttcacggatgaatactaagtacggagaatctggcttgggacttgcaattgtgcggcagttagttcttcttcatggcggaaaaattgatgtaaaaagtcagtatggtaaagggacgacatttacaatctttttccctgatcgtgaatacgctcctcataatattcaacctacaaataataaagacaaaaagtaagccaatgatttaagtgaaacgctttaactgtgataataaagtgtttattttttgtagaccaatttttataatccaaagagatttaaagaaagcgcttgtgaaagcgtttaccatatgatacacttatatctcgtaataatattacggattgataggagagaattttttatgaactacttacttgctttaatccctgcgattggttggggaattatgccactgatcactggtaagatcggtggttcaacgattaaccaaatgtttggtattggtgccggtgctacgattgttgggttggttgcatttattatcggtcatccaactgttacaacgactggattctggttctcagtactgtgtggtgctttatggacaattggtcaaattggacaattcgtttcatttaagcggatgggtgtttcaaacacgattcccctatcaacagtacttcaattagttggtaactctttgattggggttattatctttggagaatggcgtggagcacgtacccttactattggttttatcgctttagcaattgttattgttggtgctttgatgacctctgttactgatcagagcagcggaaagaaaattactgttcagaatttcctttttctattaattacttctattggttactgggtttactcagcattccccaagatgccaatgattgctaatgatagttctttaggaatcttccttccagaaatgcttgggattttacttggatctgttatttatgctatttgttcaggtaatattgactcctttaagcaaaagaagcaatatctcaatatctggggtggtatttcttggggaattgctgccttagcttatatctttgctggacgggcattaggaattaatacagcctttgtctttacacaaatgaacgttattattgcaacaattggtggtatcttagttcttcatgaacacaagactcggcgagaaatgtcatttacaattgccggaatcatctttattgttgccggaagtattttaactatttttgcttaaattatattaaaactaaacttaaaaagaccttcatcggattttgatgaaggtcttttaatatcgaaattattatttaataagggaaatttcctaagcgatctttttcagtaatgggacgaattactttgcctgggacaccaaggacaagggagttatcaggaatatctttagtaacgacagtacctgccccgataacgcaaccattgccgattgttacacccggacaaactgttacattgcttgcaagccaacagttatcgccaattgtaactggtttgccatattcaacgtcatcgaacagatcgtcagcttgttgacgaatattacgctgctgatacatgagaggatgtatggctgtaatgatcgagacgtttggaccgcacattacattatttccaatagtaacaggacatgtatctaaaatagtaaagttaaaattagcatagaaattcttacctattttagtaaaccgaccgtaatcgatatgaattggtccttgaagatatattccgtcagcatgctgagaaaataggcgatcaataatcattcctcgttcaacagtatcttcatcagttgttaaattatagtcacgataaagacgatgagcaaggtgagaaaacttattgagttccggtgttccaggacgataaggcttcccagctaacatattttcagtgtttttatccatgaataattattcccttcaatttatgtaagcggatacgctgtgtattcccagtatgcctaattaaccttaaattgtcaattttcattaagaaaaatttgctagttctgattgaaaccgacttcattatccgctatcatttaaatgtctaaaaaataaaaatagaaagaagctattggaatgacacacattaaatttgacagtagcgcattaaagcaatttgttcatgaaaacgaacttggcgaaatgcaagcaatggttaacgccgctaatgatgaattacggaatggaactggtgctggcgccgacttccgtgattggctccatttaccaaccgaatatgacaaagaagaatttgcccgtataaagaaggccgctgacaagattcaacgtgattcagacgtcttagttgttattggaattggtggttcttaccttggggctcaaatggcaatcgacttcttacataataccttctaccaagctcaaaaggcaaaagaccggaaaactccattggtagtctttgctggtaactccttgagttcaacctatgttcacgacttaatccaattaattggtgataaagacttttccatcaatgttgtttcaaagtcaggaacaaccactgaaccatcaattgccttccgaatctttaaggaccttttaattaagaagtatggtgaaaatgaagctaataagcggatttatgctactactgataaggctaagggtgccttaaagactgaagcagatgctcatggctatgaaacctttgttattcctgatggggttggaggacgttactcagttctttctgcggtaggtcttttgccaatcgctgcttctggtgcggacattgataagttgatggaaggggctgcacaagcggaaaaggattatgttgatcctgatctaaccaagaacgaagcctaccaatacgctgcttaccggaacattctttatcgtaagggctatgaaacagaattactcgaaaactacgagcctaacatgcggatgtttgcggaatggtggaaacaattagctggggaatcagaaggaaaagatcaaaagggaatttatccttcttcagctaacttcacaaccgaccttcactcacttggtcaatacatccaagaaggtcgccgtttcttaatggaaaccgttgttaagctcgataagccaaattatgacatggaaattccaacagaaccagataatcttgatggtttaggctacttggaaggtaagacaatggattacgttaacaccaaggcttatgaagcggtggttgctgctcatactgatggtggagtaccagtgatgactgttcatatcccacaagaagacgaatatactttaggttaccttatttacttctttgaggttgcgatgggaatttcaggttacttaaacggtattaatccatttaaccaaccgggtgttgaagcttataagtctaacatgttcggattgcttgggaagccaggatatgaagagatcggcaaagaattacgagctaagatggataaaaacgattaggataaattagatataatttaagaagggaatagctgttacgacatagctattctctccttttatctggagtatttttatgaaaaaagaagaattaattgaacatcgggatcgggtaaaagatcatttagtagtgtggattgttttaacaatttgtctgcaaatattaactgtttttcatatcttagcgttcttaaaatatgtagtatggctttctgctgcctatagtattttactaatcatcttgtggtgttatttagaatttaagctcctacatttaaaataatttaataaaaggagtgggactataaacttgcttcgagtttttagtcccacccctgcaagaatgactacgacgcgaagctagcctattggggtattatggacgctgatttatcaacgttcataatccatccatctactgcgttttggcagtttacactttaaaatagtaaagaggttggattattttcccagcctctcttttctattaaataagttaaataagaccaaaacgatttcttgcagctgtattaatacagtttgctaatttctctttaacctttttatttatatctaaattatcggtatcatttttaagataggcattaattatgattgaagccattacatgtttaggaacagaaaatattttaatatccatgtatttaggggggcgggaatatcttcaaaagtgagaacaatatccttaccattaacactaattgttgttttcccgcccttcacaactgtgtagtcaagttcgttaggggtacaatttttatatgcagtcataatggttatcccttcttattattaatattattgttagtataacataatttaagttataatcgatgattgtaaattgtgaagagaagaatggtaagataattgaaaataaaattggttaagaagggaataaaattataatgaacgaatatgtaattggggttaacctaggcacaagtgcagtcaaggtttcagcgatggaccgtgatggcaagattgttgcgcaacaaagctatggttatgatctccatcagcctcatcctggctacagcgaacaagatccgcgagattggctttatgaaacaacgattgtaattgatcaattaattttaaaagaacttagataatgtaaataacggagaaaacaaccgtcttaaggtcattttctccgctattttattgttaatttatttcttgaatcaatccattaaagaagtgttttagtgacacttgcccaccattagtacgctctcctttgagaaatgaaatttcattgtggacatttttatattcatataagttattcgcatattccaaaataatgtcgttttctggataatccatacacatatgtgcgagattattaagaccagtttttatatcgcgtcgaattcgttggaaaattatctttttgccatgctcatcacattggaaaaattcttcaaagttaacctcatcaaaactaatttcccgttcaatcatcgtattaataagtttgttaattgcaggagcgccatttccagctgtaataccgagaaaacgtaagatggactgagcgttttcttttttcttatttttcccactgatcgtaactgtattattattcgttgcagcaccgcttacaaggtccaaaacttgaaggaggcggttagacatattaatattttgcgctgctagtttaatcactgacttaacttctgcaatgtttagtggtttttcaataaaaaaatcaattccatgttgatatgcacttgttttaacagaaggcagaattgcttgagcagtcataatgaagtgtggataatgatgactgtcctgaattttttgaataagttgaactccatccattgctggcattgcataatcgataaacatgatatcaattcctaggcgcattgcatcgtcataggcctgttgcgggttagaagttgttccgacgacagtattgttgaaatcattttcaataatattggataataaatgaataattttactatcattatctaaaatataaaaattcatgtattttcaccgatttcttgatgttgtttgaagtattttgaaacactatttaattttactctttgtgaagataatagacaatagagttgctgttttacaaatgtgtagctgtttccgcttacatccttgtgaataaagagattgctgcaaaaaaacgctgaatttttctgttatttatggagcctttttgaagtattatgaaactttagcctattatagtacttgtattaaaaccttaggaggaaataaaaatggcttttaatttacgtaatcgtagtttcttaactcttgcagattttaacactcgggaaatggaatacatgcttgatcttgctgaagatttaaagaaggcaaaatatgctggttatgaaggcaagaatcttgaaggtaagaacattgctttaatttttgaaaagagttctactcgtactcgttgttcttttgaagttggtgctaaggatgaaggtgctcatgtaacttaccttggcccatcaggttcgcacatcggtcacaaggaatctgttaaggatactgcacgagttcttggtggaatgtttgatggtatcgaataccgtggattctcacaacgcaatgttgaaattttagctaagtactctggtgtaccagtttggaatggtttaactgacgaagaccacccaacacaagtacttgctgacttcttaaccgctcacgaagtattgaagaagccttacaaggacatcaagtttgcctttgtaggtgacggtcaagacaatgtttcaaatgcattgatgcttggtgccgctgtaatggggatggaataccacgttgttactcctaaggaattggaaccaactaaggaaactctagataaggctaatgaaattgctgccaagactggtgctaagattgttgttactaatgacatcaaagaaggtgtcaaaggtatggacgtaatctatgctgatgtttgggtatcaatgggtgaatctgatgatatgtgggaaaagcggatcaaccttcttaagccttaccaagtaacaatggatgttatgaaggctactgaaaaccctaatgttctctttgaacactgtcttcctgcattccacaacctcgacactgaagttggtaaggaaattgaaaagaagtttggcttaaaggaaatggaagttactgacgaagtattcgaaagtgaacattcagttgtcttccgtgaagccgaaaaccggatgcacactatcaaggctgtaatggttgcaactttgggtgaacaaaactaattaggaggcatttgccatggctaaagtagtcgttgctttagggggaaatgcattaggcaaatcacctgaagaacaattaaagttagtaaagaatactgcttcctcattaattgggctcattgctgcagggaatcaagtagttattagccacggtaatggtccacaagtgggtgccattaatttagggatgaattttgctgctgaacacggtaaaactgctgcttttcctttcccagaatgtggcgcaatgagtcaaggttatattggctaccatttgcaacaaagtttagaaaatgaattacaccgtcgttggatgaataagagtgtggcaacgattgtaacgcaaattgcagttgaccctaatgatcctgcttttgaaaatccatcaaagccggttggcgacttctacactaaaaaacaagctgatgaaattgccaaagaaaagggctacacttttaaagaagatgcgggccgtggataccgtcaagttgttccctctccactaccgatgaagattatggaacttgatagcatcaaaacattgattgacgctgacaagcttgttattgccggtggtggtggtggtgtacctgtaatcatcactgataaaggacttgaaggagttccagcggttattgataaggaccgttcaagtgccttgctagctgacaagatcaatgctgataagttaattattttaactgccgttgatcatgtttatgttaactatggaaagccggatgaaaaagctcttaagacgttaaacgttgcagaagctcagaaatacatgaaggaaggacagtttgctgctggtagtatgctacctaagattgaagcatgtctttcatttgttgaaggtcatccagaacgagaagcattaattacttcattagatggtcttgatgatgctcttaccggtaaagtcgggacagttattcgtgataactaaaaagaagatggttaggaaaataaaatcctggccaccttctttttttagctactctttaattttttctgtggaatgcgaatgttaatcgcaagtactgcaacgataactaaaatcgaaccaagaatatctgctcccgtcatttgtaaatgaaaaatcaggactgaaccaattgttgctgataaaggttcaaatgcatccattaaactaaatgtagttgcatcgatatattttaatgaattattagctagctgaaagggaattaaggtcccaattactagaatgcctaacacatataaccaaactgaaggaacgttaggaatatgtggttgactagggtgaataagtactaaggttaatccggcaaataatagcccccaccccgtaataattaatgagggaactcgacctttgcgaagcatgttttgtggaattaaggtgtttgttgcaacaccaattgcagaaattaatccccatattaaaacactaagcgtcattgctaaatggttaaattggccatgagttgcgataataaaaacacctaaaaaggcgataattgcactaataatttcaattcgtcgcggtggcaggtgtcgaaacacagcttgataagcaatgataaaaaagggcccgataaattgaaggatggttgcgatcgaagcattcccatattggacagccataaaataagcatattgaaccgggactaacccaaaaacaccatatgcaaagataatccatgcagagtgaagatccttaaaaatttgaaagggatgctccccacgaatttggcttaataagactaaaataattccagctgaaaccattcgaacctgcgttaaccacattgatgtaattgaactactaacattaaaaagggccttcgcaaaaagccctgaaataccccaaaaggtacaggcagtaataatcatcgctgtacctaaaacttttttatttgacataaaaatactctttccaattagatttgctattttattttatagatttgctattttattttatagatttgctattttattttaccataccaattctgtgaagagtgagctcgaccttttaattatgactatctgttggaattgttttcagcgatgattggttgtggagttcgtgaatataaagccttcacagcctctatgtctcgtgattgaatgggataatatgatccagctggctgcatcacagaaatcttgttcgtgtgctgtagaccaattgcatgccctaattcatgctcagcagtatttacgattcgttcttgtgagtagccaaaggcaggatttaataggtagtaagaatttagctctactgttgcgtgcagataatatccagttgcggaattcatgcttgtattggtaagccccgctgccccattatttggatcattaacagcggaaacactaatatttgcattcttatcattaacgattttaaatgtgaatgacttcgtgttattccattgggcaattgcggtgtctgttgcattctttaatactggattactgatattaacatagatcgttgcagagttttgttcccagcgtgcatcagcgggtgtatcttgtgccccagtttgttggtcagcattttgtttagttggggttgcaacttctttgccggttattcggtgtagccacgattgagtaagcacctgagcattatgaatgccaatattaaattgttcttgaaaggtagaattattttgataaaaccaaataattccgccaaagagtaataaataaaataaggttaataagaaattggacttcttaatcggtcacacccccctagtatttaaattctaattaaaaaagagtaaaacgtccattatttaatatttttttattgttgacaactgtaaactttgatagtatgctgtacctataatataattacaattgtaaactaaaagaaggtggaaatattgagaattgccgttataattattgccctacttttgattgcatttattgtttggtggttcttcggaaagcatacagagtcggcgggaaaatcaactattgttaatgatgaacaaactgcaacgattgtcgttaatggtggttattctccatcaaccgttaccttgaaaaagggaattccggctcaagttaactttgatatgcatgactcgacggcttgtttatcacatgtagtatttgaacagctaggagttaataaggacttaacaaagcaaaagattacgacgattaatattccaacagataaagcccagacttttaattttgcttgtggaatggatatgtttcatggaaaggttgttgtaaagtaatgaagctcacaaacattcagcgattttggatttcatttgtattatcaattccaatgttaatacaaatgcttgcgatgccttttcactggatgatgcctgcctataattggatagcattaattactactactattattatggcaatttcagcatttccatattggaaaagtgcgatcgctgcatttaagaaacatagtgcaaatatgaataccctagttgccacaggaacagctgtcgcttatttttatagtatttttgcaatgataactgatagggcagtttattttgaaagtgctgcttttgttactgtctttgttttactgggggatgcgatggaagagaaaatgcataacaatgcttccaatgctcttggtaagttgatgggccttcaagcaaaagatgctgaagtcttaaaagatggcaaatttgtcaaagtaccactcgatcaagttcaagttggcgaccttattcgggtcaagccaggtgaaaaagtacccgtagacggaacaattctggaaggggtaacttctctggatgagtcgatggttactggtgaaagtatgccggtaatgaaaaaagttggcgatactgttgttggttcaacaattaataataatgggacgattacttttaaagccacaaaggttggagcggatacaatgcttgcacaaattgttgacctagtaaaaaaagcgcaaaccagtcatgctcctatccagaacttaacagataagatttcaaatgtgtttgtcccagcagtaatgattattgctattttgacatttatgatttggtattcctttgttggcgcaacatttgttcaagcattattatttgctgtttcagtaattgtcattgcctgtccatgcgcattaggtttagcaactccaacagcattaatggttggtactgcaagaagtgctaagatgggtgtccttattaagaatggtgaagttcttcaagaagtaagtaatattgatactgttgtgtttgataaaacagggacaattacggtcggcaaaccagttgtaactgatattgttggcgatgctaaaaaagtattaacaatagctgctagtcttgaggaatcgtctgagcacccgttggcatctgcaattcttcaaaaggcaaaaaataaagagatctcaccagtaaaggtagataaatttgaagcaattgaaggtaaaggtgtgcgtgcagattataatgggcaagtagcatttgttggtagcaatcggcttttggttgatgtaaatatttcccgggaaatggcatcacgtgcagaaaaattacagaacgaagctaaaacagttgtttatgttggtcttgatggggaaataatcggcttagttgccattcaagatgttccgaagtcgagttcaaaagatgcaattgcggagctaaaagcacgtggattaatgactgtgatgttaactggtgataataaacgggtagctcaagcaatagctgatgaagttggtatcgatagggtaattgctgaagtaatgccgaatgacaaagctcaacaaattaaggaacttcaggacaagggtaaaaaagttgcttttgttggtgatggaattaatgatgcccctgctttgtcgacagctgatgttggaattgcaatgggatctggaactgatatcgcaattgactctggtggaatcgttctcgttcaaaacgatttgcgaggagttgtccgggcacttgatacttctaagaagacctttaaccggattaaattaaatctcttctgggcgctcatttacaatgtcattggtattccaatcgctgcagggctatttgcatttgtgggctttacgcttagtccggagcttgccggcctagcaatggcctttagttctgtttctgttgttagttcttctctgctgttaaataaaactaagattgcgggagaccatgttgttcaggcttaaactaagattataaggagttaagaaatataattcttagcttctttttgttatattctgcacaaagtaaaaggattttgcggtaaaatattaataaaaatgatggaggagtatttaaaatggcagctgcatttttagttcatactcgattaagctggggaaaaacgtgcgattatttaattgctaatgatgttgagccggggttaatgcatcgttatgagacacgagaagattggcaaggggttattcttgatgcattgatcaatgttcctttagcgccgtatttgccaagtggtcagcctattccgccaattggaacggcaaaagtaataggggtagaagcagttgatccgtcacaggttaaaaaaaatgtgcaacggacacgaagtcaatttataatggcaaccatttggaaaaagcaatcggccttaaaaaactataatttcttacatcatgattatgacaaatggacgcaaaagcaaatttgggccgatattgattactggtgtaattctaaaaaacatcccattatcgatttaattacaaaatggcgttgcacccgtcaacaccaacgattacgtgctgaagagaaatgataaaaaaagagttgactattaagctacttccatgtatagtatatatcgttgtaagtttaatttattgggcattcgccaaactggtaaggcagtggactctgaatccataatttactggttcgagaccagtatgcccaacttctaacaaaagacctgctagctaatctagcaggtcttttgttgataaggaagttatttgttataattacagtcaagtgaggggacgaatatggctagtaattctgattcaatttattatgttttgacaaaactaaagcatcatccagagttaattaaaagcattagaccacgttatactaatacggttatggttctttttgatgattccttaaagatagcggatgcttcattttattttcccgttgatcgtttcatggtcaatcgtttgtcaaatgattttgtggcaaagaatggtgaccttcttgatagctatttttcgatgaccaatggaacgaagaaaaattaccatgatgtttgggcgaccacctgtcatattccagaagagaaagtatatttattagaattatcatttgaataacgcaatgtaagctgcgacaaaagatgtcacagcttatttgttataaagggagagttttgtagtgcttgtttcaacgattgttttaacggtagcggcagttttaagtagtattatttccagcttttttccgcacttttcaattaattatattagtattttcgtcggcttaattattggcttagttcccttttttaatagtcgtgttgctcctttccacacagaagtattcatgtatatagtagctccattgatttattttaaggggcaatcaacgagaataaatttaattggaaaaaggttgcgacaaatctttgaaacggctgtcctcttagtgattgtaggaacaatatttgcaggttttactgtatcgcttttagaaattccactggcactagcatttctgatgggtgccttaagtactccgaccgatgctactgcaactgaatcagtttcagaaggtttaattgttcctgaaagacaagaaaatcttttaaaaatggagttattatttaatgatgcttctgggattatcttagtaactgcaatggcactgtgggtgaaaaacggtcagttcaactatcaacaaacattttttgactttttgcgttcagctggtggcgggataattattggcattttggcagcccttgtaatgatcagttttcgtcaatttttggggcgaattaaccatgatgcttataatgcgcaaatattattatttgttagtacgccattctttatttactttatagctgaagaattagaagtatctgggattattgccgtagtttgcgctggtttaatgcagaatagcgaaagtgtccgaagtcgttttataacaccccgccaattttataatgggctagtacttttaaaattgattcgggagctcttaaataataccgtcttcgttattttggtagtattggttgtcagaatcattcgtgatgacttaattattgggaatacaaattcacaatggattgtgattggaattttactctatcttactaatctccttgttcgttatttctatggactattatcaaagatgggtaataaaggaagtataatttttgctctgggggagtccatggagcagtaacactagccttagtatatatgattattgacaatgttagctcagcacaatttgacatgattgtgttagcagaaatgcttgttattattttgagtatggtggtgccttcaatcgtatttcgctttattcttgatcatgatatgtcaagtaaggagacgggaaaacagattcagcgtttacggcaagaaatggttaaagaaggcttgagagccgtggaaaagatataccttccagaaaacattcgagaaagtgtcgtttatgattcacgggatcaaaagagtgctaattcattcgcagacttttggcaccaatgggctaaagcaagtcgctatccagagttcaatgagcaggaaaaggaactggaacaacgagcattattatgggcattccgggctgaaagacaatatcttaatatggtatctcaaaaggaaaatcgtcgcgactatctttttgagctttacaatgaaattctattagcagaatcgattttgcttgacactgaaaatgaatattaaattaatttgattttaagttgacgaaaaattgaaattaacgtatacttttatttgtacgttattgcccgctggtcaaattggttaagacgtcgccctctcaaggcggagttacgggttcgatccccgtgcgggtgaatatgattgagtctgttactcatttggtaacagacttttttatttatattacaaatttagtaaaagcgttaagaaaaggtttaattgatgctatgatggatttgtgtaaatagaaaaagaataggatggatttggtgagttaattatgcgagtaatgaatttaatgatagtattagcagttattgcgattattattttagctgctcaatatttttctcagttacggaaaaaccgcaacggtaataatttcgtaagtgggggccgtgtcttttttaactggacgttggtcgctgtcttggtaatttgtgttgggggaatagtttttggtagcattcattcacatcgccaagaagcaaagccagctcaaactgataagacagaaaatgttgaatatgctgcttccgacagtgataatttgggaaaagtctcagttcagtttgatcggaaagttactttaaatgataatggagaagcaaaagttaagtttaaggtttctccacaaactactttgacaatccggggacataagagcaaagagattgttaagacgtttaaagcaagtaagggcgaatcattagttaaccatacttatacatttgacgtagctggcacttatgatattattgcagaacgcggtgatcaaaaggtgaccaagcagctaaaggttaaggacaatgataatgcccaagaaagttcatcaagtagtagttcagtaagttctagctcttcttcagttgcttcctcagcaagtagcacagtttcctcgtcttcaagctcgactgcttccactgcgcaaagtaacagtgaaagttcaagcagcacgacagcagcttcatcgaataacggaggaacttcaagaagctacaatacttctcgtccacgatatagtggcaatggcggtggaaataggacctctggtagcagtaccccgactgctcctgcgcaagaaccaagtactcctgcctatagtcaagaaaacaatggctatgttagcgatggcccacaataataatttttattcgtaatcaaatatctaatgataaaagaataaactgctttcaaaggaacaaaagatgatttttttatatgaaaaattattcttttgttcttttttattatcactaataacgtaaaatcgttgatatatcaagaatgaaaagcaaaaaatactgagaggtatattcctaaacaatttatcagtattgaaataagaatgaagtatattatactcgatattaaataatagttatcgaattataaaagtatttaagggagggagaaaaaagatgcttgatacagatgagatcaaaaaaatgaggtacttggtgttgagcttgccccggttgaaactgttggcggacaagtgaaattaggggagaaatctgcttcaagcgttgcttcactcaatagaacgccattattggaaaaaatgcttaaagcggtgccaaattttgcggctcaacaacaaaaattgaacggccaagaaccggtaataaaaaataatccagcattaggtgaatatcaactaattgatgatttaggtggcttaatgcatgggacttacttacaggcaactaatagtgaaagtcaggataaagatcgttcgcttgttagtcgtaattcaacgagtgaaacggcatcattagttaattatcgcgcagctactgattttagtggatatggtcatttgaaaaataatacagaaactaccaaatcagttgaagttgtctatacgctgcctacatttgaagggaaacaaggaacggtacaaattgtacttgatggggcgcggattaatgaatttgacggtcttgaatataaggatgaaaagggaaatgtaattcctggatttgatattacctatagttgccaaggacacgaaggagagtattcaacgattgatactcttaagcagcgtgatgattttagctgggaaaaggtaacagcggttatggtatttggttccttattgccaaacagttcttaccgtgttgaatttccttttaagattacaaatctagaaaatattaatactcaagagcaatttaatttaaatgaatatgccttttatgatttaacagttaataagcatacaacgtcacaattaaacttccgcttaagtacgcctgttttttgcccatgatgcctattaaaatatctcattcatggcattcagccgaactgaagatggtgatgaggtatttccagaagatgttcaagcaatgatgccaactttgggtgaagtaccatatgcgatcagtaactttaacgatgaaatttcatttgagactgatggagataatgtaatgtggcaaggcggtcaatacttctttaagctggccgctattcaaggtgcgattcaagaaaagggattttcagtcaatgttgataagacagggagaaagttaatggaggcctctgcctttatggttcaacctacttatcttgattttgaaagttttgacttcattccttatgttgtcattcaccaactttttattactaaatcatttacgcttaaggcagaggcaaaagatgattggaattcatttggcgggattgaaaaagtttgtggtctctccgcaactaatgaggaacttccggttagtcctgagcaaacatttattgtggatgattctgaattagtcgatgcaacccctagtgattataatgtcattattggttatttccttaacgggagtgaggacaatgatatgttaatcatttcactggcaaaggtaaggatggttgaaaataaacagacaattaatgtttactatgttgacttggttaatatccctgataaaaccaaagatgatttacaaccaagtggcggaaagattctcgaaaatcaaacccaaacttttaccggccaaggtgatgaagattatcataatgaactctggggtgaagaaaacggctttgagatttatgaatatgaccaaggtgctaaattaaggacctatgtcggtagacaaccagctaaagattattatgtttatcttattcataaaattgaaaaaatcaatgaagatcatcaagtaacacgaacaattacttttaatatgccagatggatccaagcagatcattaagcaaactggaaaaattcagcgttttggaattactgataaaacgactaatgaaaaaacatggagtgattggagtaaagctactctccccgcagttaccgcaccccatgttcctggatatacgggtaaaaacgttgatgctgaaccaatttcattaatgtcaaaagatagcaatattaatgttatctaccatccaaagcaagttagtgtcaagattaaatatgttgatgaagctgggaatgtaattgatgagcaaatagtttctggacttgctgacgacttgatcagtcataagccaacagttgaaactgaccgtcttgctgatgaaggttacgtgattgttaataatgaattgccacaaaatgctcgcttaatagccgaagacagtgatcaagaaaaagaatataaggttattattagtaaacaagatttacagacacaacaaattaccgtcttttatgttgatgtccctgataatcgattaccaattgtcaagccttcttctgggcggattattgataatcggacccaaagattaaatgttacagaaggacaaacatatagtaatgaactatggaattttgaagatgacgggtatgaattgtttaaggctgacaaaggggcattaaaggggaagtactttgctggtagtctggaacaacaatattatgtttacctcactcaccaaactactcccctaaaaaaggaacatcacgtaacgcgaacgattcagattacaatgcctgataaaacacaacaagttgtaactcaggaagcaattgctactcgttttggcgttcatgatgaagtgcttggtagtgacatttggcaagagtggagcaaaggagtgattcctgaatatattccaacaccaatcgcggggtatgatgcatctgctattccagctgaacaggttgatgaaaatgcgagcgatcgaaatgaaaagatcagttacactccacaaccagctaaaattttggttaaatttattgaccaaactggtgcaggattaacatccgaggaacttactggggtaaccggtgaagaatttaactacgatccaactccgcaaattaagtcatttgaagatgagggatatgtgcttgatgaaaatagtttccctgctgatcatcattttacagctggggaacagacctatactattactttaaataaattagtagcagtaacccctcatggtaatagtgaggcagaatcaacaatcgaacaaattaagtcgaacgatgatgataaaactggaaataaaaagggaatctttgctgcatttaaaggctattttaaataaatgaattaataaaggagtacaggaggaataaaccgctaatggtaaattccttctgtactcctttttgagttaaaaatattaattatcataattgccggtgattgggttcatttcatggatttgatttgtagcggggtcatattgatagataccagtaaggtgagctatatttggatcgccgccttggttattgcgaacttcaatttgataattattattttgattattcttagtcatgtaataatgattgccatcttgttgaacaccacttgtcttgacaaaactcgttaggacttgttgatcgttttgtgctgaggaagtggaattggtagttgctgattggctgctagaactactagttatggatgaactaggagcttttaccgtttgattagttgatttttctgaactgttagctacctttgagtttacgcttgttgagcttgtatttgttgaagaagtggactgtacactagtaggtgcagaggtttgctcctttgccttttcgctattagtggaggaggccgcctttttacttgtttgttgacttacttttgtcgcagaagtagatgtctttgttggagctgctgcgctattggtacacccagctagtccaagggctgctaaaattactaatgaacttgttaaaactttatttgtcatcttcatcattttaatgaccccctcaatctctcttatttttataacatcattacacctatattataccgccttttgaaatgattttgtaacatttttgacttatttgtcataattgactgattttgtttaataaatttctggatatttttcctttgtctgatttacgttaaaataaaccttattgaggaagtgaattaaaatgatgaataaatacgatttaacaattactaaattacaccaaatggttaaagagggagttgttccaggagttagctatttgatttttgatcatcaacatacgattaaggaagtaacagggatggcccaaatttatcccgagactgaaatattaaaaccaggcatgctctatgatattgcttcactaacgaaagtgataggaacagttccggttattgcccagcttattcagaaaggaacattgtctttagatgatccggtaaagaagttcttaccagaatttaatgatgaccaaccaactattcgcaatcttcttacccatacttctgggattactggttatattccccatcgtaatgagttgactgcctccaaactaaagaatgcttttttgacgaaaatgtatgtggaggatagcttgaaccgccaaatcaaatatgcggatgtaaactatttgtatttaggatggattattgaacgaatttataatcaaccagttcaaaaggttattacagaacaggtccttaaaccattaaatatgccaactgcgacatttaggcctcaaccagctaactgtgtaccaacagaagtacaagaaaaacggggcttaattagaggagaaactcacgatcctaaagggtatattttgggagaaagttgtggatgtgctggcctctttgcatcgttgaaagatttagaggtctttagtcacgcacttattgaaaataatttaaaaggtcttcttacttctgaaacaactgatcttctttttacagatcaaacacgaattcctggtccacatagtcgctctcttggatggaaactgtttcacgctaaagaccaccaccttttgattagtcacactggatttacgggaacttggatggtattagatcgtcaaactgaccaaggctttattgtattgacaaatcgcgtccatcccagtgctaaaaatcaagaatatttagatgctcgtgaccaactttttgcaatttatttaaaagaaaaagaaaaaactttgtgaaatttatatgcagtcaattgaataaccgctttcacagaatatgcgctttaggggtaagaaatgtataaaaactgtcgataatttatattaataacttctttttatatgattcactaaatattgatttgacggcatttgacaacgtttacataaactaatatgatgtagttgtagtcaagtgatacttcaaaaaggagtgatattgtatgcaaagtccaattcacgttacatcagaaattggaaagcttaagacagttatgttgcatcgaccaggtaaggaaatcgaaaatgtttatcctgaaattcttcaccggatgctcgtagatgacattccatacttaccgatcgctcaagaagaacatgaccttttcgcccaaacgttacgcgataatggcgctgaggtattgtatcttgaagatttattaacagacgcactagcagatgataatatcaaagaagaattccttgaaaagatcattgctgaatccggttatgctgctggagcaatccatgacggcttaaaggaattcttacttagtttcagtactaaggacatggttaacaagattattgctggtgtacgtaaagatgagattaaaactaagtatgcttctcttacagaattagcagaagatagggattacccattctatatggatccaatgccaaatgcatactttactcgtgaccaacaggcatgtatcggggatggaattaccattaatcacatgacctttaaggcacgccaacgtgaatctctctttactgagtacatcattaagcacaataagcgttttgctgacaaaggtgttgaagtatggcgaaaccgttatcctgaaggccggattgaaggtggagatgaattagttctcagcgatcatgtattagcaattggtatttctcaacgaacatctgcaaaggctattacagaattagctgaaagtctcttcgaaaagtctgattatgatacagtaattgctatccatattcctcacaatcacgcaatgatgcaccttgatactgtgtttacaatgattaactatgatcaatttacagttcatccagcaatcttacatgatggcggacatgttgatgcatacattatgcacccaggtaataatggtgaaatttcaattactcatgaaacaaatcttaaagaaattttgaagaaggcacttgataagccggaaattgatttgattcctactggtggcggtgacccaattattgccccacgtgaacagtggaatgacggttctaacacgctagcaattgcccctggtgtagttgtaacttatgatcggaactatgtctcaaacgatttgctgcgtaagcatggtattctcgttcacgaggttcgttcaagcgaattatcacggggtcgtggtggtccacggtgcatgtcatgtccaattgttcgtgaagatctcaagaaataaataagataataaaagcagcaaatttatctgagtaatctagaaagggtataattttactgctttttcttgtatcattttagtgtaattaacatgataagaagggaacacgaatggatcgaaaggcaagaagaaaatatattgaacaagtggttaatgatcgtaaaattgagacacaagaagaattgcttaagctgttaactgaggcgggtttcgaaacaacacaagcaacaatttcaagagatattcatgcgttgaatattgttaaagcaaatgatggcgatggtcatacccattatgttcaacttcatgtgacgcccgaacataattttgagcgcttatatcaagggattcatgataatgtgcggacaattgaaactgttcaatttatgaacgtaatcaaaaccgcactaaattctagctatgcgacgattttggctggaatgtttgatgaacttgatattccggaagttgtgggcacacttgctggaaacgacaccttgattatcatcagtaaagataatgatgatgctaaaatggtctatgacttaatcattcaacatatgcattcataaactgcataggagggatatttatggatgaacaaaagaaaggtattggtagaggcgaattaatcgccttaattgtaagctcatgtatcggtaccggaatatttggtatcactagtgatgtagcggcagcggcagcgccaggacctgcattattggcctggatctttgttggaattggctttttaatgctggttctctcgctaaataatttatccgaaaagcgaccagatcttacttcagggattttctcatacgctggtgccggctttggaccattaggtgaatttatttctggatggtcttactggttatccgcatggctgggaaacattgcttttgccaccatgttgatgagctcgattggaacgttctttccaacatttaaaggtggtcaaaacttaccctcaattattattgccatcatcttctgttggctattgacaatcttagttaacaatggtgttgaaagtgcatcctttgttaacatgattgggacaatctgcaaggtcttaccattggttatctttattataatgatggttgtttgctttaaagccgggatgtttacagcagatttctggggacgggttgctaataatgcttctcgcggtaccacaactggttctgtttgggaacaaatgaaaggtaccctaatgacattaatttgggtatttatcggtgttgaaggtgcctctgttatggcaagtcgtgctaagtcacttacagccgctcgtgaagcttctcttattagttttggccttttagtagttatttatgtattgatttcgattttgccttatggtgcattaactcgggcagaattagctggaatgggtcaaccagctattggtcatgttcttcaagcaactgttggtagttggggctcgattttaatcaatgttggtttaatcatctcaacaattgtttcctggctttcttggacaatgcttccagccgaaacaacgatgttagttgccgatgataaagcaatgccaaagctttggggaaaggttaatgctaaaaaggcaccaactgcttccttgatgattacagcggtattgcaaacaatcttcttgttctcgttgcttttcactgataaagcctatgaattcgcatattccttatgtagtgcagcaattttattctcatacttatttgttggactttaccaaatgaaatacagttctgcacaccaagaatggggacaatttacaattggtttgctctcggctgcatttatgttcgcatgtatgttccttgctggatggcaagaagtattattagtttcaattagttttattcctggattctacatttactacttagcatgtaaagaaaatgatcgtaaagttacaactgctgaaaagtggacaatggcgctgattttaatcctaagtatcattgcaatttggcttgttgctaatggaactattgccattagctaggtaaataatgtataattattccacattttaagaatatttataagtgaggtgattaaggtgaaggaaaagaagttaaatctcttcctcttaatcaccttaattgtaggaacgattattggtggtgggatttttaatagtccaaccgatttgattttgaaagcaaatccaatggctgcgttaattgcatggttaattggtggcttcggaattttgatgttagtattagtcttctacaagctttctgttgtcaaaccggagatgaacggtggaatttatacttatgcaaaggaaggctttggcaactatattggttttaactccttttggggatattggatgggagcagtttttggtaacattgcttttatctcgctcttttttaagaccttaaatagtatgatcgggacgcatcaactttcgccattaatgtgttttatcgggggctcaattattctgtggggatacactgcgattacatggtttggtgtccgcgaggcaagtattctcaatgccattattacgattattaagatcttaccgcttttattagttgttattgttggtgtttttgcatttcagccgcatgtttttaatgttcctgattggacaagcattcttgctgttaatcaaacgcatgtcccatttaaagaccaaattagtggtgcgatgagtactattgtgtggtgttttgttgggattgaagcagctgtttcaatgtcacgtcgggcaaagcagccacgtgatgttggattagcaacgattattagctttgtaattgtattggtcctctatatttcaatctctattattccaatggggattctacctgctaaagaacttagtcagacttcagttccactggcagcagcccttagtcatacagcattaggaatagtgggaagccttattattaaaattggcttactgatttctctattaggagcattattgagttggtttatgattggaccagaaattgcatatgtaaccagttatgatcgggatatgccgcgagcatttaaacttgttaatcgccatggtgttcctgggtttgcattaattgtatatacaattattatgcaagtatgtttactagttttactgcttccacagcttcaaatggcctatacaattgcatatactttagctgcgacgatgaccttagttgcttacctgctctctgcgttatatgggttgaaattagcaattagcgaaaaaatgggccttggctttaagattattgctacgttagcttctctttattccgtctatatgttagttgcttcgggacttgaatatgtatttgcaagtgcgattatttttgcgctaggaataccattatttgccagggctcctaataaaatgagtaagaaagaaaagtggttagcaacaattatcgccttagcagctgtgattgcgctgatgctgattattactggaaagattaatttttaaaaaattaaaagggatgaggttagaaggaatttttactttccttcaatctcatccttttttgtattctaatcttcgctagtcatcttacttttcatgttatccattcgccagacaacataggtttcaatcaatgtgattaggcttacccataaaatcgtgaaatttgatgaagtaagaaatagtaagatgattaggatccaagatatccagttccaacgacgctcaagacgaataacttttgcaaagcgtggtgggattctagttggattttgaatggctagtgcttgtagttgggagaaaagacggacttcacaaaaactttctagcaaaaaaataatggtaaatacaaatgttatggtttggttcactgtttgtcaccttaattaaaatgtaggtttaatttttagggctttttgactgcttaagtcggcatcggggtatttatgctcaagagctgctaaaagaatctttttagcaatctcaccatttcttgtaagaatgggaccgtggaaataagagcaataagtgtttttatagattgctccttcggtatgatcttcaccgttatttccattaccagaaattactttaccaagcggacgctcaccttttcctaagaatgtgcggccgttgtgattttcaaaaccatggtactcttgattgctttcttcgtttttgatggtgatatcaccaatgaaacggtgattatcctggcttaaagtatagtgatcaaggatgccaagccccggaatcttttcgccatcagcaccgatataatagtggccgagaagttgataacctccacaaatagcaagcagcggctttccatcattaataaacttgtcaatgcctgcttttttgtttggaagatctttggagacaacaagttgttcgtaatcttgtccaccgccgaaaagagctaaatcaaaatcttgtggattaaagtcgttgtcgatactaatgactttgacattaatatcggtatccatctgtttagcgtaatattgaagggcgataatattaccgacatcactataagtatttaataaatcgccgtagaggtgggcgaggtgtaagtgatattttgccattagtccattcctcctttaatatagcccttttctgctagttgtttgcgtaattgcagaacggctgtatatgttgccagaatatagacatgttcagttggcatttccttgattttatcaattacctgggtaaggtctggttcatgccacatatcttttacgccggccattgttaatctagtggtaatatctttatagcgttctcctcccgtcatgtattgtgggatttgatgttgggtaagtttttcaaagtcgccgtcccagatccagctagtatcaattccatcagcatagttagcatttagtaagaaggcaaagctaaagggctcgtcatctgtctcaatcatatctaaaacctgattaagaccaactggatttttaactaagatcaaagtaacttgttttccatcgatattaatgacttcttggcggccaaaaactcgttcgtctgattcaaaagcatctttaatttgtgcttggctcactccgagaaaacgaccaagagagtaagcggcaagagcattatagatgttatataaaccaccgattccgatggtgtatttttgcccatcaatttcaaaagttgaatgcgtgggggtaagcttatcaattttggtaacagcatacgttaattctggtcgatggaaaccacaatttggacagaagtagttacctagcccggcataagttcgcatttgatactttagaatgtgttgacatttaggacaaaggagaccatcagtgttagctggggcgttgaaaggctctttttcttcgtggttaaagccataatagatgattgggttaggcaagtctttgctgttaaagagctgttcatccccgttagcgatgatggttgcttttggtgctaatttaaccccctttaagatcttgttataagtggtgtagatttcaccgtaacgatccatttgatcacggaaaatgttggtgaagacaaaggcaattggggtgatgtatttacatactttaactacatttgcttcatcgacttcgaggacggccagcccttttttctttggatagggagccgtaataaaggtagttacgattccttgctccatgttggaaccagtcggattagtaagaacttggtcatacttttcccgtaaaactcgtacgcttaatgcggtggttaatgtttttccatttgtccctgttacaataacaaggtcgtactttttgctaaaggcttggagaatatttggatcaagctttaaggttaattttcctggaagggaacttcctccgttcataaaagtatggaggaaccaatagcttgaccgcccggcaaattcggcaaatgaacttcgaactgtcatgaatatatgtattcctttcgtgtcaattgtaagtgatacaatagtgatgattaaaattaccgtttaattctaaactttacgataacaaaaagaaagttattaaactgaaattattataagattaaagttattcaatgtaaaaaactctttcctaatgtggaagtatttaaatgacacaaatttttggatataatgaagagtactatgcaaacaaaaaggagcaattgtagtggcacaactattctttaaatatggcgcgatgaattctggtaagtcaatcgatattttgaaggttgctcataactatgaagaacaagggaaaccggttgttttaatgacgagtggtgttgacgatcgttctggtcgaggcatcattgctagtcggattggcctagagcgtaaagtaaaaccaattatggatgataccaatatttacgattatgttaataagatggaccgtaagatatattgtgtattgatcgacgaagcacagtttttaaagaaagagcatgtcttacaattaatcaaaattgttgatgagctaaatattccggtaatggcttttggactaaagaatgactttcggaatgaattatttgaaggttcaaaatatttactgatttatgctgacaaaattgaagagatgaaaacaatttgttggttctgccctcataaagctacaatgaatttacggattcataatggcaagccagtatatgagggagaacaagtccagatagggggaaatgaatcatattacccagtatgccggaagcactattttcatccccaattaaaacaataggaggaataatcaagaatggaaatggaagaaattttcgataagcttcaagcagttgctgatcgttacgatgaactaaatgaattgatcagtgatccagaagtaattgccgactcgcaacgttttatgaagctttcaaaagaagaaggaagcttacgtgaaacagttgaaaaatataatcaatataaaaaagtcacccaaacgattagtgatgatgaagaactattgcgtgaaacaaatgatgatgacttaacagccttaaccaaggaagagttagcggaagcgcgcgaagaacaagcacaattagaaaaagagcttgaagttctactaattcctaaagaccctaatgatgataaaaacattatcatggaaatccgtggagctgccggaggggatgaagcaagcctctttgctgctgatctatataacatgtaccttcgttatgctgaaaagcaaggctggaaagtagaagttgtggatcgaaatgaaactgaagtcggtggctttaaggaaattgccttaatgattactggggataaggtttattctaagcttaagtttgaaaacggtgcgcatcgtgttcaacgggttcctgttactgaatctgctggacgtgtccatacgtcaactgcgacggttggggtaatgccagaagctgaagatgtggatgtagatatcgatcctaaagatatccgggttgatgtttaccgttcaagcggtgctggtggtcagcacgttaacaaaacttcatcagctgttcgaatgacccacttgccaacagggattgttgttgcaatgcaagatgagcgttcacaacagcagaaccgggctaaggcaatgcggattttgaagtcacgggtttatgattattaccaacaacaagaacagagcgcctatgatcaaaagcggaaagacgcgatcgggacaggtgatcggtcagaacggattcgtacttacaactacccacaaaaccgggtaacagatcaccgtattggattaacattaaataagcttgataagattatggctggtgacctcgatgaaattattgaagcattgattgttgccgaccaaacgcaaaagttggagcaattacgaaatgagtagtttcgtaccgaccaactactttatggctcagcgatgggcaaaagaacaattacaaggaacaaatattgacccaagtgcccctcagtttttacttcagcaatcacatggttgggatgcgactcacttacttttgcataatcgtgatgagatgccagctgacgaagtagactggtggaaggatgccataacaagattgcttaatcatgagcctgctcaatatattgttgggcaggccccattttatggacgaacttttaaagttaataaaaatgttttgattccagaagctgagacagcagagttaatcgattgggtgttgcaagaaatgccatctcgcccattaagaatccttgatttaggaacggggagtggagtgataggcattacccttgcacttgaacggccaaattggcatgtaagtttaagtgatatttcaaccgctgcgcttgctattgctcaggaaaatatggctaagtttaacttggagttgccgttaattaaaagcgatttatttgaaaatattgatcagcaatatgatttaattgtgactaatccgccttatattgacccagacgatactgatgaaattgatcaagcggtccttgaaaacgaaccagccctagccctatttgctagtgaacatgggttaggattctatcatcgcttatttaagcaagcagggcaatacctaactacaactggtcaaatatttggcgaaactggttatgatcaagaggagtcaattcaagaattactacatcaaaccgatgaacacgcacagatatgcccacgacatgatgtggcaggaaaaatgaggatgatacacgcatgggatttttcaaacgtaggaggaagatagtaagaatggatacgaagatttttcgacatggtgagattgcccaagcagcagctgcgattaagcgcggtgaattagtggcttttccaaccgaaactgtttatggattaggggctgatgcgaccaatgaaaaagccgttaagaatgtttatttagcaaaagggcggccaagtgataatccattgattgttcatgttaactccatcgcaatggttaaaaagtatgctgccgagattcctgataatgcccgaaagttgatggatgcattttggcctggttctttaactattatcttgaagattaagaagggcgcactttcaaaaaccgtcacaggtggtttgaaaactgttgcctttcgttaccccgactgtcaaccaacccttgacttaattgaagaagctggtgttccgatggtgggaccatctgctaatacttctgggaaaccaagcccgactactgcccaacacgtttatcatgacttgcatggtaagatctctggaattgtggataatggtccgacacgggtaggagttgaatccactgtccttgatatgtcaacagaccaccctgtaattttacgtcctggtgctgttacgaagaaggacattgaaaaagtgattggatccattgaccttaatcatcataaagtaggcaaaaatgaaactcctaaagcacccggaatgaaatacaagcactatgcacctaaggcccaagtatatattgttgatgaagatactgattgggataaagttgttgaatggatacgacaacagccatttgacgttgggatgatggctgaagaaaaggttctccaacaagaagtattgccgatgaatgctattcaattttcattaggaaaaaatgttcaagatgccagtgctcgtctatttgatggcttacggcaatttgatgaccaacctaatgttaaagcgattgtcactcaagcatttccagctcatgatttagggggcgcatacatgaatcggttaaataagtcggctggtggtatgcactttgataggaatgcggtaaaataataagggaacgtagtggaagaggtaccactccctaattaaaatctcaataaaataataaagagactgagtaggattcccagcctctttatttataaccagaggagatgttgtaaatgaactatggtaaaaaatcaccccaattatgggcagccattgaaaatgaagaacaacgccagcaagatacgattgagctcattgcctccgagaatattgtttcagatgctgttcgtgaagctcaagggtcagttctaacaaataagtatgctgaaggatatcctaataagcggtattacggtggttgtgagtttatagatcaagttgaacaattagcaattgattatgctaaaaagttattcaatgcagcatatgttaatgttcaacctcattccggatcacaagctaatatggcagtttatcaagcacttctcaagcccggagatgtgattttagggatggggatggatgctggtgggcacctaactcacggagcaacggtcaattttagcggaaaactatataagacgtatggctatggcctaaatccagatactgaagagcttgattatgatgaaattatggcgttggctaaaaaagtaaagccacaattaatcattgcgggtgcttctgcctatagtcgaattattgattggcaggcatttcggaagattgctgatgaagttggggcttacttgatggttgatatggcccatattgccggattagtagcaactggtgtccatccaagtccacttccaattgctgatgtcgttactactactactcataaaactcttcggggcccacggggaggaatgatcctctctaaatcgactaaattaggacggaaaattaattcagcagttttccctgggatccaaggcggaccactggaacatgtaattgcggggaaagctcaagcattttatgaagatttgcaaccagaatatacggaatatatccaacaagttgtaaaaaatgctcaagcaatggaaaaagtatttaatactagtaaacaaattaggatggtttcaggaaaaactgaaaatcatcttctcgttctggatcttactaagactggtttaacaggaaaagatgcgcaaaatctccttgaccgtgtctacattacaaccaataaggaggccattccgaatgacccacgaagtccatttattacaagtggtttgcggattgggactcctgctattactagccgcggatttaaggaagaggatgcgcaaaaagttgcggaattaatcagtacagctttaactaatcccaccgatgaagagtgtctacaagaggtcgcaaaaggggtacacgaactaaccacaaattatccgcttaactaaaaaattagaatataaaaagttgttaagatcctttgtcatgacttgatttttttggtagaatagtgaagaaattcaaaggagtgtatataggcatgggtaaatttgaagtgttagatcatccattgattcagcacaagctaacaatgattcgggataaaaatgttgggacaaagtttttccgggaaactgtcaaagaaatttcaactttaatggcttatgaagttgcacgcgatatgccattaaaggatgttgaaattgaaacgccaattgctaaaacgacccagaaagaattggctggtaaaaaggtggcgattattccaattcttcgggccggaatcggaatggttgatgggatgacggaccttatccccgcagctaaaattggttttatcggaatgtaccgggatgaagaaaccttaaagccacatgaatactttgttaagttacctaatgatattacagaacggcaattattcatcgttgacccaatgctggcaactggtggttcagcaatgatggcaatcgaagccttaaagaagcgcggttgctcagaaaagaacatgaaatttgcttgcttagttgcagcccctgaaggagttaaggctgtgcgcgacgcttatccagatgttgatatttatacagcaggacttgatgatcatcttaatgaagatggatatattgttcctgggttaggtgatgctggtgaccgtctttttggtactaagtagataattaagaattaaaagcatgatctgtagaaaactttttagctttcgcaaattttgcttttatttttttgtttgtgttgaaaaggctttcgcttataataggtactataccagaaaaggggaattgattaatggagacccaaattaatggaattgcagccagtgatggagtgggaattgcacctgcttacttattgacgaagcctaatcttagttttgaaaaatatcatattagtgaccccgatagtgaaaaagcgagattgcactatgcttttgagaagatcattcagaaactaaaggaaaccaaaaagaagcttgttaataaacttaatgcagaaaatttggcaatttttgatacccacattgcaatcttaaatgatcctgaaatgattaaacaagttgaaaaccggatcaccaatcaacgcttaaatgcagaatcggcttttgcagaagtaattactaagatgatcaaaacccttcaggcgatgactggaaatgaatatatgcaagagcgggcatctgattttcaaaatattcaagaccaggttttagcagagttagaagggaagaagctccctaatttacgtgaattagatcaccctgtcattgtagtcgcccattcgattggtccggccgatacttcacagatggatggccgctttgttaagggaattattactgatttgggtgggcggactagtcacgcagcgattatggctcgttctttacagattccagcaattgttgggtgtaacgacataaccaaaaaggtgcagaatggccaacgagtaattgttgacggctttgaaggcagtgcaattgttgaaccatcaacaaatgatgttaaacaataccaaaaaattactgataagtttatgaatgtccgtcagcaatggaaaaaaatgattaaccagccctcagtaaccgccgatggtcaacggtacaagatttcagctaatattggttcttcagtggatatttcgtcagcaatagaaaatggtgctgatggtgttggcctatttcgaaccgaatttctttatatgaaaagtgaccaccttccaaccgaagaagagcagtttaatgcttatcgccgagctgttgaacagttaaatgggaaacggttagtggttcggaccttagatatcggtggagataaaccacttcaatttatgcccttacccaaagaaatgaatccattccttgggtaccgggctattcggattactcttgatcgaccagaaatgtttaggactcagctgcgggccttactccgagcatccgagtttgggaagattaatattatgtttccaatgattaccacgcttgaagaattacgagcagctaagaaaatctattatgaggagcagcagaaattagctgttgatcatccaggaattggccgcgatatccatcttgggataatgattgaagttccattagccgcgttaaatgctgatcgcttagctgcagaagttgatttctttagcattggaactaatgacttaatccaatattgttttgcggctgaccgtggtaatgattcagtttcgtacctttaccagccgctaaatccaacttttttaaaattaattaagcacattatcgatgctgggcatgctcataatacaacggtagcgatgtgtggagagatggcaggagatcattatgcgttgccactattaatcgggatgggattggatgtctattcgatgagtgctagttctattttacggacacgttcaatgatgaagcaattagacagcaaaaaatgtcagaaactctaccaacaggctgttacaacttgtgattcaatgaccggtgtgaaaaagttagttcaagattggttggtagcaaactaaaaaggatttaggaaaagtaaagatttttcttaaatcctttttttatctcttgttaagagtaaaatggcaatagttttgctgtactagggggatgtaaagttgtgattaagcaatactggacaaagcaaagaatctggttgttaatttttttaatggttgttggaattggtgctctcttatttaccagccataatgaacagttttatcaacaaccaattgctaaagtaatcagcaaaaaaacgatgagtaaacaaagagtaaaagaccagtttgataatgttgaccatcaatataatcaacaactccaagtaaaactaatgaatggcaaatatcgcgggcaaaaattaacagtccaaaatacatatagcgattcgcaaccgatggatcaacgttatcgggtaggaaatgaagtatttttaacccagcttcgcaaacgaggcggaaaactgaccgccaatgttaacggttataagcgagacacagtaattgtctttttactttggcttgttgtcttgatgctgcttctccttatggggcgttcagggatgtttgcattcttaagcgtagtaattaatgctcttttgtttataattgcaattgagatcgacttaaagcaaaatggtcagcatatcatgctgctttttagcgttcttgccataatttttacgtttattagcttattattagttcttggttttagtaaaaggatgctggcgacttttgcggcaacagttattggaacatttgttgccttgggagtaagtatgcttgtatttatgtggacgcatgaacgggggatttactatgaatcaatggaatatgttacgcaagttcctcgaccgcttttcttagctgaaacattgttggggtctttaggagcggtaatggatgaatcaagcgatattattgccacactttttgagttaaagcagttaaatccagctgttacccgcaaacagttatttatctctggccgcaatgttggtaaatcaattatgggaccgttaataaatgttttgtttttaatttttatggtggatacctttactggtagtcttttgtatatcaaaaacggtaactcgtggggatatacctatgcaatgaatatgagcttagggactattcagagcctgatcagtgggattggaattgtcctttcagttccccttgtcagtctatttggggcattattattaggtaagaaggtgcaaaaatgacgacaattacgggccttggcttagtattgctaattttgatggtccttgtgggagggaaacagggctggacagcttttttaagcttgcttcttaattttggctttttatattttgcaattattttagtcgcgtttcatgttcccccgttatttgtaacggtaactattgggattacaattttggcaataactattttcatgggggaagatgatttgcggacaaccgtgacggcattttatgcttcactcatcgtgctatgcttaattttagtgctgatctttattgtcgagcactgggcaatggtgcagggctttggaacagaagatagtgatgagttagaagggatgtcaattttaattggaattagttatttcaaagtttctgttactactactattttgagttcactcggagcaattgcagaagcggcgatggcgatctcctctggccttaccgaaatccttgagaatcatcctgaaagaactaatcgtcaattaattcatagtgggatggcaattgggcaacagattattggaacaacatttaatacgcttttctttggcttctttggaggattcttagcactatttatttggttcttaggtctccattattcctttggtacaattatgaataacaaaatttttgtggcagaaatgattgaaattctgatctctttcatcggggtgctgatcactgttcctatgaccgcttgggtgatgacaaagcgtcgtaaagttagtgtaagattttcataggttggatgaataattcatctggtcgtggaaatcttttttgtagaccaatttacttatttacaaaaaaagaaaagaccagtagcctttagtgtgtcgaatactaagcaaaggcaggtctttcctcatggatattttaacagaaatcgagcagaatttggtgaaatcaggcagtttatttgaagctgaacagattattttaaaaggggtattggagttaggacaagtaatcatgcaaaactttttggaaagcttagatcgaagcttaaagtcccaagctccagcgaactatcaagtaattaataaacagccacggacgcttaattttatctttggcccggtgacttttcaacgacggtattatcaggctgggacaaagaaacgtgaattttacttagaccaacaattaaaaattaaaccacgtcgtcgtttatcgccacaatacttaatgatgatggctaagattgcccaaacaactacaatgcgcaatactgccgacattttgaaccttgtatttgacagcggaattactgccgattcggtaatgcacgccgtgcatgagttaggaaatcaggtagctaaacaaactcaagcaaaagaacaccaagctactcctcgccatatgcctaaaaatttaactattgagggtgatgcctttatgattaaaggtaaaaaagaagcaggtcagctgactcttgtgcaccattatcgggtttatgagcgagtagctaatcaaatcattaatcggcatgactttctcagtgttgggcaccaaggacggcttgaagcacgactaagtgattatttagaccgccattataagcttgccggtcaaacgatctttttggccagtgacgctggcccaggttacgaaccagctaagctattaagtctagttcctcaaggtgcacatggtgaatactttctcgaccgctatcattgtttacagaaaattgaacatactttaggccggcacaacgagttagccatgcgagcaattaaagccgttcgtcatcatgatcaagcagagctaacaataattttagatacttatgaatcacaaaacctaacggaaaaacaagcagacgacctaatgcgtttaagaaagtatctacagcgaaattggcggtatatcctctcaccacaaatgcgtggatttaaggatattcatttaattggttcagtcgaaagttctcaccgggcttttacttaccggatgaagaaacagggcaagtcatggactaagcagggggctaaagccatgattggtttaattgaagcccgaatgaatggtgaactgcaagctagtttaaatacaatcctagaacaattaacagttcttcctcgagtggctcaaaccagcctattacaggaaatgcatattcgaactggagagtttctaagaaaggcaccgacaaagccgtcaattggagcagtacaaggaataattccgattaacacggccacaagtagaccaatgggacaactttttaaggcactaacccactaaaactgtatatttaaaggctacctatgaaaacttgacagataccgtcgtaaatctgttgttgacaattaccctaaaacaaagtaacatacgaataacttataaatagacctttaatcggagtcctgtgagacttcaaaggtgcggataaattttcaatgctctttccatagatttggattgagtagggaagagacgactttggagcaggaattccaaggccgttttttctttaggaggatttatatggcgcaccgtgataatgttgttttagatgtagatgaacgaccagctccctggcagtggtttggcttatctttgcaacatatgttttctatgtttggctccactgtcttggtcccaattttggtaggattaaatccaggaattgctttatttagttcgggagtaggaaccctgatgtacttactcattactaagcataagattccggcttatatgggatctagtttctcatttgtggtcccgatgatggccttaatgaaaactactggttatccgggtattgcacaggggaccattgcagttgggtgcgtatatttaatcgtatcagtaattgtaacgttggttggctcgcaatggattgaccgcattttgccaccaattgttgtcggtccgattgttgttgtaatcggattatcattagcaggaactgccgctaaagatgctaccatcaattcggctactggccattatgatttgcgcttttttgcggtcgcaatgcttacgatggcaataacagttatcttcaatatgtattttaaaggattcctcggtttaattccgattttgatggggattgtcgctggttatattattgcggtcttatttggcattgtggatttttctccagttgcgcatgcacattggtttagtttgccagactttcagattccatttgttgattatcatccccaattatactggggtgcgattttgagtatggccccaatcgcttttgttaccatgacagaacacttaggtcatattatggttctaaacgagttgactgagcgaaattacttcaaggaaccaggattgaaccatacgcttgcgggagatgggacggcttcgattattgctggtttcgttggcggccctcccgtaactagttatggtgaaaatattggggtaatggcaattacgcgtgtccattcagtttacgttattgctggagcagctgtatttgccatcttctttagctttattggtaaattaagtgccttgattgaatctattccttcaccagttattggtgggatttcattcctactatttggtgtgattgcttctagcggattgcgcgtaatgattgaaaacaaaattgattttaatgaaaaaagaaatttgatgatttcatcggttattttagtaattgggattggaaatgcctatcttcaattaggaaaatatcaattctctggattagctgttgcagctgtcctcgggataataatgaatttaatccttccacaaaaagccaaaagtgaaatgtagtttgaatttttaagcagagtaagaaaaggcatccgacctcttactctgcttttttcgtatgataacaaaacaaaaaaattaagaggtcgtggaaaaaaacagattataagaaaaagtttatcaagtctaagaaaacgctttctttacactcttgtcaattgattagtaggtatatataaacctaatgtttttttgaattttaacgaaattaatgatatattaacattcgtaacttggggtagttcgttttatttgcaacgttcatccaatttacaagccaaattattgttataaggaaagaggtggaatatgaatgggcggtgatgctttaacttttaagcttttcggacttacgttcaatactacgaacattgtttctggactgattatctacgcaatcgtgttcttcactctttacgggatgtcacgaaagatccaaatgaagcctactggtgcacaaaatgtatttgagtggctagttgacttcactaatggaattgtgcgaagccagatgccagcatccgaacaaggtcactatagtttctttgcctttgttttgtttgttttcatcttctttgcaaaccaattcggtttaattttccaattccattggaacggagctgaggtgcttagaagtccaacggcagatccagttgttacgttaacactttctttaatggtaatggtattagcattcgctgctggagtagcacataatggccttggtggatacctgaaagggtacactaaaccatttactttaatgcttcctgttaacattatcgaagactttgctaacttcttaactcttggtctccgtatttttggtaacatttttgccggtgaacttttaatgagtttgattgctaatatggcattctcacatggaatcctaactattattccagggttgttcttggaactagcatggcaaggattctccgtatttatcggttcgattcaggcatatgtctttgtaacattaacgacggtttatatttctcggaagatttccgaataataatccctaaggaggaattttaaaatggcattaggagcaattgctgcaggactcgcggctatgggtgccgctatcggtggtggtatcggtgacggtatcttaatcggacacacagttgacagtatcgcacgtcaaccagaattacaaagtagattacaagcaacgatgtttattggtgttggtttgattgaagccatgcctattattgccatcgttattggcttccttgttatgaacaagtaattattttaagttttttattttaagataaggaggtgtcaatagatgtttgtaaacagtgtgttagctgaatcaaacagtttatacattggtgacttggtattctacatcgttacttttatcatcttaatgctattagttaagcattttgcttggaaaccggtaacagatatgatgaagaaacgtgcagataagattgctaatgacattgataatgctgctcgttcacgtgaaagtgctgaaaagatggctgcaaagcgacaagctgagttacaaagctcacggcaagaagctgctgagattgtaagtaatgctaaaaagtctggggaaactcagcgagcacagattgttgaaacagcgcaaaaagatgcccaagctctcaagcaacaagcacaaaaagatgctgagcaagcacgtcgcgatgcattaaacagtgctaaggatgacgttgcaaacttatctattgagattgcttccaaactcatccaaaaagaattaaaggcagacgatcaaaaagaattgatcgattcctatatcgaagggttggtagaacatgagtcttgataagaagacagttgctgatcgctatgcgaaagcactgtttgaattggtcgatgctgataacgaactcgatcaaacttatcaagaattgattgctttacgccaagtctttgaggacaacgagggattggacgccgcacttgcgggagttcaactgtcacttgatgaaaagaaatcattgattaaagatttacagcaaggtgcttcaaagtacgttgctaacttaattcaaatggttttcgattacggccgtattgactgcatggtcgcaattattgatgagtttgaacggcggtatgaccgtaaaatgaagcggatgcatgctgacgttaccacagcgatccaactcgataaacaacaagaggatcaactaaaggctaatcttgcaaaacgttttggtgctaatgaagttaccttaacagaacatgttgatccagaaattttaggtggggttattgtccatgttgataataagacattagatggtagtctcagctcaaagattaagcaaattcgtcgtttactagttagataaatatatcttttttcaaagaggtgagacctttatgagcattaaaactgaggaaatcagttcactcatcaaaaaacaactcgccaactaccaagacaaagtatctgtcgaagaaaccggtactgttacctatgttggtgatggagttgctcgtgccgatggcttagataatgctatggctggtgagttgctcgaatttagtaacggggtctacggaatggctcaaaacctcgaaagtaatgatgtaggtattgttattttaggggattacacaggcattcgtgaaggagacaccgttaagcggacgggtcgaatcatggaagtacccgttggcgatgcattattaggacgggttgttgactcattaggtcgtccaattgacggtcttggtgagattaagacagataaaactcgtccaattgaacgtaaagctccaggtgttatggagcgtaagagtgttagtgtaccacttcaaactggtattaaggttattgatgccttagttccaattggacgtggtcagcgtgaattgattattggtgatcgtaagacaggtaaaactgccattgcgttagacactattattaaccagaagaaccaagacgtaatttgtatttacgttgctattggtcaaaaggaatcaactgttcgggctagtgttgaaacccttcgtaagtatggagcattagattacacaattgttgtttcagctagtgcttcaaatcctgctccaatgttatatattgcgccatatgcaggggctgcgatgggtgaagaatttatgttcaacggtaaagatgttcttattgtttatgatgatttatcaaaacaagcggatgcataccgtgaactttcattaattcttcgtcgtcctcctggtcgtgaagcttaccctggtgatattttctatactcactcacggttgctagaacgtgctgctcgtttgtctgatgatcttggtggtggttcaatgaccgccttaccaatcattcagacccaagctggtgatgtttctgcatatattcctactaacgttatttctattactgatggtcagatcttcttagattcagatgaattctatgcaggtcaacgtccagctatcgatgctggtacttcagtttctcgtgttggtggtgacgctcagatcaaagcaatgaagaaagttgctggtactttgcgtttggatattgcttcatacaacgaattagcatcctttgctcaattcggttccgaccttgatgcagctacgcaagctaaattggctcgtggtcaacggactatggaagtcttaaagcagggattacatgatccgctaccagtagaagaacaagttgtaacattatttgctctttcacgtggttttatcgataaagtcgaaattgaagatgttcaacgttacgaaagtgaattggctgcttacatgcatgctaaccaccaagacctctacgacaccatcaagaagactggtaagctaccagaaggcgatgacttgcaaaatgctgttgctaagttctctgaaacatttcaaggaactaaaaagcaagccgctgaagaaaaatagttaatgatgattagtcgaaaggacggtgagatttagtgccagcttcactcgctgcagttaaacataagattgattccactaagagtacgcgtcagattacttcggcgatgcaaatggtttcaaccgcaaaactgaatcaaattcaacaccacactcagacctacgaagtatatgctgagaaggttaagcaaatgttgtctgatctggttaaatctcacagcgcaacatctgcagcttcgcaagatgatgtttacgctgcactgtttaaaaagcgcgcagttaaaaagactggggtgcttgtgattacgtctgaccgaggtttggttggtagttacaacagtaacattatcaagcaaacgttagatatgatggctaagcacaatcttgataaagacaacacggtatttctgacggtcggtaaaacagggacagaattctttaagaagaggggaatgaatgtcgtttacgaatattcaggcgttagcgatgttcctacctatcgtgaagttcacagtattgtgaagaccgctgttcaaatgtacagtgatcaagtatttgatgaaatgtatatggtttacagtcattatgttaaccggattacatcaaatgttattgttcacgatgtactcccaattactgaaaagtcattactcaatgacgaaaatgaagcacaagaaaatacagaattaaataattctgatgtaagtactgcgcacgtttctgccgagtatgaatttgaaccgtcagatacagaaatcatttctgcattggttgcccaatatgcagaaagtttgatttatggagcgattcttgatgccaagacatcagaacactcttcaagtgcgaatgcaatgcgttcagctacagataatgctgatgacattatctctactctcgaattgcaatataaccgagcacggcaagcagcaattaccactgaaattacagaaattactggtggtatgactgctcaagaataattttttctaacgtaggaggaaacaacatgagttctggtaaagttttacaagttatcggaccagttgttgatgttgaatttcccttagacgaaaaacttcctgaaattaatgacgctttgaagattaaggaaagcgatggtaagactttaacaactgaagttgccttggaattaggtgatggtgttgttcgaacaattgccatggacggtactgatggtcttcaacgtggtatggaagttgaaaacactggcgcatcaattagtgtaccagttggtgatgatactctgggacgagtatttaacgtcttaggggaacctgttgacaacggaccgaaatttggtcctgatgcaaagcggatgcctattcaccgcgatgcaccaaagtatgatgacttaaacaatgctaccgaaattttggaaactgggatcaaggttattgatttactagctccatatgttcgtggtggtaagattggtctattcggtggtgccggtgttggtaaaaccgttttgattcaggaattgattcataacattgctcaaggtcataatggtatttctgtcttcacaggggttggtgaacgtacccgtgaaggtaatgacatgtactatgaaatgaaggcctctggagttcttgaaaagacggccatggtttatggtcagatgaacgaaccacctggtgcccgtatgcgggttgccttaactggtttaacaattgcggaatacttccgtgatgtaaagggacaagatgttttgctctttatcgataacatcttccggtttacacaagctggttcagaagtttctgccctcttgggtcggattccttctgccgttggttaccagccaacattagctactgaaatgggtcagttacaggaacggattacttcaactaagaagggatctattacgtctattcaagccgtttatgttccagctgatgactataccgaccctgcaccagctacgacatttgcccacttggatgcaactactaacttggaacgtcgattaacccaaatcggtatttatccagccgttgacccattagcttcaacttctactgctcttactccagaaattgttggtaaagaacactatgaagttgctacacaggttcaacacgttcttcaacgataccatgaacttcaagatatcatctctattttaggtatggatgaattatctgacgaagaaaagacaatcgttgctcgtgcacggcggattcaaaacttcctttcccaaagctttagtgttgcttcccaatttacaggtttacctggtaaatatgttccattaaaggaaacaattaaaggctttaaggaaattcttgctggtaagtatgatgatcttccagaagaagctttccggttagttggaccaattgaagacgttgttgaaaaggcaaagaaaatgaaggctgagactgacgaagatagctcagaagactaggagggataattatggctgaaaatacttttaaggtcactattattactccagatggcaccgtctatgataatgataaggttactatactcgttatgaacactgctggtggacaaatgggaatcatggctaaccacgtaccattaattgctgcacttgaaatcagtacagttcgaattaaacattctgaaggcactgatgaagttgcagcggttaacggtgggatcattcaatttgatggtcaaaatgctacaatcgcagctgatagtgctgaaatgcctgaagcaattgacgttgagcgggcacagagagctaaaaagcgttctgagtctgcaatcgaagaagcaaagaagaagcataaccagagcgatttatcacgtgcagaagttcacctcaagcgtgcaattaaccgtttgaatgctgcttctaagcaacgcaatatctaaggtataatatcaaaaagaggttggagaaaataatccaacctctttattatgtgcgcccggcatgggtattagctaggcggtgagagtccgctatgggccgtagtagtcggaaccatgagctgaggacaagggtgtccactgcgaggtggaatctgaaggaagtctaaggcaaagtactgcaccgatgaacaagaagtagctataaggctggaactaactggataagactgcatgacaagttaaagtccaacactactcgaagttactttcagtaaagctaccggtgacatggtacgaaagttaatatccttacccggggagatctggcctacacgtttccgacaagaggaataagtttaatttccacagaaacaagcggtgcagtgatgtagcgttgagtaagccagaagtcagccgaggtcatagtagtctgagtaatcagatgaaggactgaacgacaataacttgtaacttatatcggaggtgtaatcaggtgcgacaatcgcagaaaacagaacaacaagctgaccgcttgtcgaggataggtttggaaaaccgaaagtacacaagggcgcgtagtaccgattatggtgaaggtaaaggtatgagtgtcactatccaagacttagtcttggaccgcaataaccttaatcaggcttatttgcgagttaagagaaataaaggggcagcaggcattgacgatatgacagtcaatgaccttctgccatatctcagagaaaataagacggaattgatcgctagtttgcgtgagggcaagtataaaccagcaccagtcaaacgggtagaaattccgaagcctaatggtggagtaagaaaactcggaataccaacagtggtggaccgaatggttcaacaagctgtggcccaaattcttacacctatctttgagcgtgttttctctgataatagttttggcttccgccctcaccgtggggctcacgacgctattgcaaaagtagtagatctttataatcaaggttatcgaagagttgtcgacttagacctaaaagcctattttgataatgttaatcatgacttgatgattaagtatcttcaacaatatattgatgacccatggacactaaggctcattcgtaagtttctaactagcggagtcttagaccatgggcttttcgctaagagtgaaaaaggaaccccacaaggagggccattgtcaccaatactggcgaatatctatctaaatgagttggataaagagttgactagacgtggtcaccactttgtgcgctatgcggatgattgtaacatttatgttaaaagtcaacgagccggagaacgagtaatgcgaagcattacccagtttcttgaaaagcgattgaaagttaaagtgaacccagataaaaccaaagtcggtagcccgctacggttaaagtttcttggcttttcgttgggtgtagaccacaatggagcctacgcccgtccagcaaaacaatcgcaacaacgagtaaagaaagcattgaggttattaactaaacgtaatcgtggaatatccctgacaagaatgtttgaagaaattcatcgaaaaatgcgtggatggcttcagtactactcaattgggaaactaactgactttattcaacgccttgacaagtggttgagggcccgaataagacagtatatctggaagcaatggaagaagcttaaaactaaggtaactaacttacagaagctggggctgtcccagcgtgatgcatatgtcttcgctagtacccgcaagggctactggcgaactgcacacagtaagaccttgagctattctctaactaatagaaaactggaacaactcggacttatgaatatgtccaagacgctccagtcaattcaatgtgattaagttgtcgaaccgccgtatacggaaccgtacgtacggtggtgtgagaggtcgataattgaactaatcaattatctcctactcgattttaaagtgtaaactgctaaaacgcagtagctgcctaactatctttacggggtgggactaaaaactcgcaagcaatttagtctcacttccttttcgtttaaaagatcattaagcttttttacgaattaataatttaatcatgtgatatgatatgattgaatttagtttaaaagagggtgatcgattgcaaattacaggattacgagcgctaatagaaataatagtgcaactggcatttgtctggttagcgttttttgctattcaagggatacattttgagcatttttttaaccgaccaccacgtacattgcctctacttattgttctgatggctactggactaggatatttatgtgcgacatttttcttaaatatcctaagtgcaattggtaatttgacatatttaattcgatagtatttactggaggatcttatggaaaaaattgttgttaagggcggtcagaggttaaccggtcgagttaaagttgaaggagcaaaaaatgcagtcttaccaattcaagcggcatctattttggcttctagtggaaacattaaattatcaaatgttcccattttatcggatgtaacgacaatgaatcagttattacggttcttaaatataaaagtagattttgataaaaataagcatgttttaacaattgatgcagctgaccctgtattatctgaagcaccattagaatatgttagccggatgcgggcatcgatggtagtcttaggccccttgctagctcggacaggtcatgcgcaaattgcgcttcctggtggatgtgcgattggttcgcggccaattgatttacatcttaagggattacgtcaattaggagcggttattgagcaacacgatggatacttagaagcacgggctgaacacttaattggtgatcatatttatctagattttcctagtgtcggtgcaacgcaaaatctgatgatggcagcaacccttgcgcagggaattacaacaattgaaaatgccgccagtgagcctgaaattgttgatttagcaaatatgttgaataaaatgggtgcacgtgttcatggtgctggaacagacattatccggattcaaggggttaatttccttcatggttgtgaacatacagtaatgccagatagaattgaggcaggaacatttatgattgcgacagccattactaatggtgatgtagtggttgaaggagcaatcgctgagcataacacctcactaattgctaaattggaggaaatgggggtgacagtcatcgttcaagaagacgggatccgtgttcttgggacttctgttctaattcccacgaatattaagactcttccatacccaggatttcctactgatcttcaaccacaaatgtccgttctccagcttttggcaaatgggaccagtaccctagatgagacgatttttgagaagcgttttatgcatttagaagaattacgacgaatgaacgccgattttcaaattaatggtccagttgcggttttaaatggtcccacgcgttttagtggcgctgaagtagctgcctctgatttacgagcgggggctgctttagtattggccgggttagttgctgatggaattacccaggttcgtaacctaaaatatattgatcggggatattaccatcttcaccaaaagttacaacaattaggggccaagattgatcgaattgatgtcgaggataaaattaaattggcggtaaagccttctaagaataaaacaaatcaagattaaagattcgtaagcgacgtctatctatatccctattttgtggtataattacgaacggtattaacgagtttagtgttaaaacttaactagctaaaaggagaagaaattaatggcaaaggatattggaattgatttgggaactgccaatgttttgatttatgttcaaggcaagggtattgttctaaatgaaccgtcagttgtggcggttgatacaaaaaccaataaagtattggctgttggttcagaagcataccgaatggttggacgtactcctagtaacattcgggctattcgtccattaaaggatggagttatttctgattttgatgttactcaagaaatgctttcctactttattggtaaactaagcgttaaagggtttatgtcaaagccaaacatcatgatctgcgcaccaacgaatattactgagattgaacgaaaggcaattattcaagccgctgaacaatctggtggtggtaaagtttaccttgaatacgagcctaaagtagcagcaattggtgctggattagacatttttaaacctcgtggaaacatggtcattgatatgggtggtggtaccagtgatatcgccattctttcattaggcgatattgtctcaagccagtcaattcggatggccggtgataagatgaatagtgatattgcttcttatattaagaataagcacggcctagtaattggtgaacatactgctgaaaagatcaaaatggaactcgggactgcattacgggttgatgatcctaaaacaatggatgttcgtggtcgtgatgtagctactggaatgccaaagcaaatcacggttaatgaaaatgaaattgaagaagcattgcacgatacgcttgaacaaattgtttcagccgctgtaaatgtattagaaacaattccaccagagttagctagtgatattattgaccggggaataatgttaaccggtggtacttctttgttaaagggtgtcgatcaattattcagtgctcgtctaaaggtaccggttgttgtttcacaagacccattagacaatgttgctaagggtgctggtgaaatgttagaacggatgcaaaagactgaacgaaagaagtaagttgaaatggtaaggattttatgtgaccttatacgctggtatcaacaaggcatttccgcccaacgaccatttcgcgtatgtcgctttaccccctcatgttcacagtacatgttagaagctttacaacgctttggtttaaaggggatgttgctcggaagttggcggctccttcgttgtcagccgttttctcgtggtggctatgatccggtacctaatcattttacttttcgtcgtcaggggtaataatagttattaagggtgaaaaagtgtcaaagaaagataaaaaagtagaagtcagcgttaaagatattgaacgtcgtaatcaaccggttcaacaaatttttattggagaccgattgattggtgaagttgtaaccgataatgaacgtttcaaagcaatgctgataagtgaccagagcgaattttatgttcgttctcaagaagagggattagaaatagtccttcaacaatatcatcttcaccagcattagtttggtgaaccatcctctttgattaatattttgtaaaggagtttggtaatgcaacgttcgcaaaatgatgtagaaagtcggattgactggggaattatattttgtgttcttttgttagccttgattggtcttgcttcaatctatgtagcggcagttcatgatcggcagcaaactagtgtagcacgacaggttattacccagttggtttggtatgcggttggaacaatccttattattgtcattatgcaatttgatgctgaacaattatggaaattagcaccaattgtatactggctaagtgtatttttaatgttcgcaatcctagtattttatagtcgagcctattatgctagtaccggggctaagagttggtttgcaattggaccatttacgtttcagccttcggaaataatgaagcctgcctatattttaatgatggggcgtgttattacgactcataataaccgatatagtgtgcatactgttgattcagattggcgattaattgggacgatgttcttatggctattaccaattttaatttcgctgaagtttcaaaatgactttgggactgggttagtattcttcgctattttctgtggaatggtcttagtttctggagttacttggcgaattttggcgccagcagctacgatattagttgttgttgggggctcagccttagcgatggtaactagttcggttgggcgacaaatacttgaacatgttgggtttcaagcataccagtttgatcgggttgatacctggcttcatccagaacaggatacaactaaccaagggtatcagttatggcagagtattaaagcggttggttcgggtggtattactggaactggttttaataactcaaaggtttatgttccggttcgtgaatcagatatgattttttccgttatcggtgagaattttgggttcattggtggggttttattaatccttatctacttgttactgatctacttaatgattcgagtaacattcgataccaagaacgaattctatgcttatatctcaactggagttatcatgatgattttattccacgtttttgaaaatattggaatgaacatcggtctattaccattaacaggtattccgcttccatttattagtgctgggggatcctcattaattggtaacttgattgggattggaatggtaatgtcgatgcgttaccatcatcattcttatatgtttagcagtaatcgtgaatttagatagtgaggttataaaatggcaaaagattatttttgggtaaaagagcaagcagatggtactaagcgtgtcggcttaaacgatgaaggccgtgatgagttaggagaagtaagtttcatcgatgtaccagcagtagggacaactttgaaacaagctgacaaatttattgcagttgaagcagaaaaagcagttaccgatgtggatagtcctattgatggtaagattaccaaaataaatgaagctattattgatgatccggctggattaaattcaagcgatatggaaaaaaactggattgttgaagttaaataaaaaataggagactaggattaggggaaccttgattttagtctcctatttagtattggcggatctttccagttcatgttatacttaaggttctaggaaaacggctaagataaaaatatttaaggtggtatttattatgaccaaaaaattacacatcgctttattatttggtggtaactcctctgaacatgatgtgtcaaagcgatcagcacataatatctatgatgctcttgataaggaaaaatatgatgtaagtctttttatgtttacaaaggatggaattctattaggcaatgaggattctcaaaagatctttgatggtgaacctgaagaccaagtggtagcagaagcatatcaaaagatggatatgagtagtccattagcaccaattatggccttaaacgaacaaaaggaaattgatttcttcttccctgttatccatggtaatttaggtgaagatggtacaattcaaggcctctttaagctccttaataagccatacgttggttcaaatattgcagctagtgcgatgtcttttgacaaggatcttactaagaagattattagtcaagctggtattcgcaacaccccttatgtagtagttacgccagaaaaccgggctgattattcatggagccggattgaagaaaaattaggtaatctcacttttgtaaagccagctaagcaaggttcctccgttggaattcatcgagttactaacgctgaagaatatgaaaaagcgttagatgatgcttttaagtatgattacaagatcttagtagaacaggggatcgctaatcctcaagaaattgagatttcaatcttaggaaatgaacatccaattgcctctaagttaggagctgttcgtgtacctaaggacgatccattctatgattacgaaaacaagtttgtggatgccagcggggttgtttttgaacttcctgttaaattaccacaatacttagttgatgaaattacagatatggctttgaaagcatacaaggcattaggaatgaagggaatggctcggattgactttttagttgacagcaataatgtcccttatcttggtgaaccaaatacattaccaggatttactaacattagtctgtaccctcaaatgtgggaagtttctggtatttcatattctgacttgattgatcggttaattcaattaggattacaagaatttgaacgaaacagcaagattaaatacgacttccgtaagcttggtactgaacgtgttggtcaaaagaaatataacgaagactaaagaataattatttaatggttaggatgttgtgaagacaatgtgctaactatttttattattaaaattatagcaggaagtaaatattatcgtaatggtatgaaatccgtggtttagtattgcagtaagcaaaatttataatataatgaagatacgtagtttttgtaagcgttagagtagcttacagtcacactacttatagtactttataaccatcgcagggggtgactttgaaggtggttataagcatttattttttataaaatttattgtattttaagcataaaaatagtattgatttatttttggtctataataaaagacctaggtaaagccaaagtaatttttgttgctgatggtggtataataccattggcaatggtacagttcatagagtacatattttatattcaacaattatgattaaggaaggtaaacaatgagactccgaggagacgtattaaaacaaattcgtcgcaagcgtggattgtcccaaacggctttagctgaagggatttgtactcaagcgacaatcagcctaatggaaaaacaaaatcgcttacccaaaatggatattttaacggcaatatgtgaacgcttaaatatttcttctgatcgaattgtcgaaaatgaagttagtggaattaatgaaacattcaaccaaatcgttgataatttgatttcacgcaattttgaagatgcttcagcgcttttgaagaaggttcatgtaaaaaatctagaaagtgattttgataaacaacgttactactatctagtaggaatggttcaagttgaaagtaatcaaattgatgaagccatttttaattttgaacttgttttaactcaatttgctactactagtgctaatatttatttagctatgacaactgcaggaatggcgcttgcttacttaaaacgtggtgataaagaacgggcagcacggttaactaaccggtctgtaaaactgattgataataaaaaattgattgggagcctttatcaatgggcatcaattgattgtcaaattgcagaattatatctgcaacttgaagaccctgataacgctattgaagttgctaataagggaattgaactttgtcgggaacatgattcattattcttattagatgaactatatctttgtataggtcgtagctacatcctaaagaacgacaaggaagaagctaaaaaggctttaaagattgctgaaagtcttagcattgctcgtaatggatcagtagcagaagatacaattctattagagttaaagaatttagaaatttaattaatatacgtaactgaaaaacgaagctgagagatggttaagatgtctcagcttcgttttttagtataaatttaaatatttatccgtacaaataattaataaaaacttaattgattattaaagactaatttcagtttatgtgcattaaacgagaattagtcttttttagtagtaaaaaaataaaaatatttttcacatgcataactgcttttaaatacaagatagacatgaaattgttaaatgtataaaatgctttttcacaattggttatgattaattttaaataattcacttgatttatacgtacaaatattttatagtaataattgttcaatgaaagcgcgttcatgttcatgaaaaactattactttttaatttttaaggaggatgaatgtaatggctaaagccgagaagaaaatatcaagtgcatttatctacttcttcggatcatttgggggcatcctatttggttacgatatcggtgttatgactggtgccttacctttcttacaagctgattggcaccttgaaaatgcagcttctctagttggttggattacttcagcagttatgtttggggctatcttcgggggcgcattagccggacaactttctgataagtttggtcggcggaaaatgattttaatgtctgcgattgtattcatggtattctccgttttatctggtgtttcaccagacatgggcgaagcaagtgcctattatctaattattgttcggatgcttttaggtttagcggtaggggctgcctcagccttagtaccagcttatatgtctgaaatggcaccagctaaagcacggggacgtttatctggacttaaccaaacgatgattgtttccggaatgttattatcatatgttgttgacttcctattgaaagaccttcctggtgaatgggcatggcgtcttatgttaggattggcagctgttcctgctttaatcttattccttggtgttcttcgtttaccagaatctccacggttcttattacgtaaaggtgatgaagcgcaagccaggaaagttctttcttacattcgtaaaaatccagctgagattgaccaagaattagcaagtattaaagaaaccgctaaagaagagcgacaagcaaatcaaaagacaagttggtcaaccttattcagtggcaagtatcgttacctagttattgctggggttggggttgcagccttccaacaattccaaggtgcaaacgcgatcttctactacattccattaattgttcaaaaagcaactggccaagctgcatcttcaaacttaatgtggccaattgttcaaggggttatcttagttgttggttccctggtttacatgtggattgctgataaatttaaccggcggacattgttgatggttggtggtgccgtcatgggactttccttcattcttccagccgttattaattggatgataccaaatatgaatccgatgacgattgttgtgttcttatgtatctatgttgctttctactccttcacatgggctccgttaacatgggtgcttgttggtgaaatcttcccactagctatccggggtcgtgcctctggtttagcttcatcatttaactggattggatcatggttagttggtcttatcttcccaattatgacggcaagtatgccacaagaagctgttttcgcgatcttcggaattatctgtatcttaggagttatctttgttaagacttgtgttccagaaactcgtgggcacactcttgaagaaattgaagagcaaggaacaaaccatggtcgagtaaaggccagcaatcctgaaaactaggaggaatactctatgaatttacgtgaaacagcgacacaagtaaaaaatggtcaggcttcactaggaattgagttaggctctacccgaattaaagcagtcttgattaatccagattttgaaacaatctcttctgggagctatacctgggaaaaccaattgaaagacgggatctggacatacccgctggatcaggtttgggaagggattcaagctgcttatgccaagattaaggcagatgtccaaagcaagtaccatgtgagcttggatgaaattagttcaattggtgtcagtgccatgatgcatgggtacctaccatttgataaaaataaccaattacttgttccatttagaacctggcggaataacatcactgaggaatccgcagataagttaactgatttatttgattttaatattccacaacgatggagtattgctcacctctaccaagcaattttgaacaaggaaccgcatgttaaagacattgatttcattacaactttagctggttatgttcactggaaactttcgggtgaaaaagttttaggaattggggatgcctcaggagtatttccaatcgatgatcaaacattaacttatcatcaagactttattgacaagttcaattcattaccagaagttgaacaatacccatggcaacttaagaatattttgcctgccgtccttgtagctggctgtgatgctgggcacttaactgctgatggagcaaaattacttgatccaagtggaactttacaagctggtagtttgatggcccctccagaaggggatgcaggaactggaatggttggaactaacagtgttcgaaaacggacaggaaatatttcggttggaacttcagccttctcaatgaatgtgttagatgctccattaaagaagcttcaccgtgatattgatattgttactacgccaaccggtgatccagtagccatggttcatatcaataattgttcttctgatattaacgcctgggttggattatttagagattttgctaatacaattggagccaagatcgataccaatacgctttacgagaccctatttgattcaacggttcactccgacccagatgctggtggattaattaattatagttatctttctggtgaaaatattaccaagattcaggaaggacgtcccctatttgtccgtactccaaatagtaagatgaacctcgctaacttcttccttactcaactctatgcagcatttgcgccattgaagattgggatggatatcttactaaatgaagaacacgttcaaaccgatgtcatggttgcgcaaggaggactctttgggacaccagttattgggcaacaagttttggcgaatgccttaaatatcccaattacaatcatgaatactgccagtgaaggtggaccatggggaatggcggttcttgctaagtatgctgagacgtacggaaaagaatccctagcagattaccttgacgaaaaagtctttaagaatccagaaagtatgacccttacaccagaacctgctggcgtaaaaggatatgaaagctttattactcgttaccaagcaggcttacctgttgaagcattagctggtgatgacattaaagaacgtgaagagaaagggagtaaatagtacatgttagaagatttaaagaaagaagtttataaagcaaatatgcggcttcctaaactaggccttgtttcctttacatggggcaatgtttcagggattgaccgtgaaaaaggattgtttgttattaaaccttctggagttccatatgaagagatgaagccggaagacatggttgttgtcaacttggatggtgaggtagtcgagggtgacttgaatccatccagtgatactcctactcacacttacctttataatcacttcccaaagattggtggagtcgttcatactcattcaccatgggcagtagcgtttgcagctgcacggatggatgttccagcaatgaataccactcacgctgatactttctatactgatgtcccagctgctgatgctttgacgaaggaagaaattgaagaagactatgaaggtaatacaggaaaggtaatcgttcgttcattcaaggaacggggtttggactatgaagcaaccccagcggcattagtaatgcaacatggtccatttacctgggggccaacacctgacaaagcagtttataatgctaaggtgttagaagttgtggcagaagaagattatcatgcaatgcaattaacgcaccaagaccttcacttacctcaatacttgttggacaaacactattaccgcaagcatggtgcgaatgcatattacggacaaaataatgcgcattcaaaagatcatgcagctcacgcttaattaatttggtagctacatttaaaaacttttttaggataaaaggagtgtaatctcatggatattaagaattacgaattttggtttgttactggtagtcaattcctttacggtgaagaacaattaaagtcagttgctgctgatgctgaagatattgttaataagttaaacgaaagtggtaagttgccttacaaggttgtcttcaagggtgttatgacaactgctgaaggaatcactaagtttatgaaggaagctaactacaatgacaacgttgccggtgttatgacatggatgcataccttctcaccagcaaagaactggattcggggaactaagcttttacaaaagccactgcttcacttagcaactcaatacttgaacaagattccatatgacaccattgactttgattacatgaacttaaaccaatcagctcatggtgaccgtgaatatgcttacattaacgctcgtttacaaaagcataacaagattgtttacggcttctggggagatgaagaagttcaagaagaaatcgctgactggcaaaatgttgcggttgcttacaacgaaagctttaacattaagattgttcgttttggtgatacaatgcggaacgttgccgttactgaaggtgacaaagttgaagcccaaatgttccttggctggactgttgactactggccagtaagtgacttagtagaatatgtaaatggtatcagtaaagaagaaattgatgctgcttacaaggacttagcaagtcgttatgaaatggtccaaggtgataatactaaggaacactatgaacactcagttcgttaccaacttcgtgaatatcttggtttgaagaagtttatggatgaaaaaggatacactggctttaccaccaactttgaagacttgcatggccttgaagaattacctgggttagctgctcaattattgatgcgtgatggctacggctttggtgctgaaggtgattggaagtctgccggaatggatcgcttattgaagattgctgctgataatgttgctactgcctttatggaagactacacattagaccttcgtccaggtcaccaagcaattcttggttcacacatgcttgaagttgacccaacaattgcttcagataagccacgagttgaagttcacccattagacattggtggtaaagatgacccagcacggttagtatttactggtcgtgaaggtaaggctgtcgatgttaccctttcatacttcaacgatggttacagggttattggttactcagttgattgtcataagccagaagctgaaacgcctcatcttccagttgctaagcagttatggacaccaactgttggcttaaaggaaggtgctgaacgctggatgcatgctggtggtggtcaccacacaatcttgagtttcagtttgaaaccacaacaaattaaagatcttttcggaatgttagatgttaaagttgattttattgaatagttaattcaaattaaaaatcctcaaaatggttctactcggcaaacctcgagacgagtagaaccattttttatcaggagatggaaaaataaaaactgaaaaagagaaaatgctagcagaggaagcttttaacgtttacgatcccgaattagttaaagagcgtcaatatgcccgtcaattagttgagcgatttaatgctcttggcgagatgaacccgactgcaagcaatactgtgattcgtcaattgtttggacacgttggcgaaaaatgtgaagttcatccgcaattcaaatgtgattatggttataacatttatgtagatgatgattttttcgctaattatgattgtgtcatgcttgatgctagtccaattcggattgggaagcattgtttattgggaccgtgagtgcagatttatactgttaatcatctcttgaacccacgattacggcgcaatggagcttacggccaaagtaaggatgtcactattggggataatgcgtggattggtggcggggcaattatttgtccaggtgtaactttgggtaataatgtaattgttggtgctggaagtgtagtgacaaagtcgtttggtgataatgttgttattgcgggtaatccagcacggatcattaaagagaatccatatgtagaataattgattatttcccaggttatttttaatgcaaaaagggaactaagatatggtcatgtgacggccgttatcttggttccctttatcattcttaatatttaaggttatattcgtaaactagtgctggttctttacctacgcgtgtaaagttatttaagttattaatagcagtcatttcctcgtcgcttaatgtgaagtcatagatgttaatattttgcttgattcgcgcttcatgaactgacttcggaatgaaggcgaccccgctttgcaaatgccagcggaggacaacttgagcagcagacttatgatggttagcagcgatcttattgagggttagattgtcgaggatggttccacgcccaagcggactccacgcctgggtaacaatatcatgttccttatcgtattggagcaatggttgttggtttaggcgaggatgacgttcgatttgattaataacgggcatctcatgcgcttgagtagcaagatactgaaggtgaatcatttgatagttactaacaccgattgaatgggtcagaccttccttttttaattcttcaagggctgcccaagtatcaaagaaagctcgctcaattggccaatgaataagtaaaaggttaacataatcaagcctcaacttttgaagggagtctttaacagaggcaattgtttgcttaaacccttgattaggttcagatacttttgtggtaataaaaaggtcctcacgaggtaaaccaagctcttgtaaggcgtttccaacctctgcttcgtttttatataattgcgcggtatcaaaaagacgatagccagcatcataggcatactttatcgcggaggtaatcgtactttgatcagtaattttatataagccaaatccttcttgaggcattgattgaccatcagcaagtaataattgttttatcttattattcattgatattctcctttgtaataagcgaagtggtcgattgtcccttaattattgttggggtataaacttttgaagtgacttcttcgcctgcaatcatttttaagatcattttcccagcatcttcacctagttgacgtttggggtgattagctgtagtgaggctgggggagataatttgcgccatttcatagttatcaaaacctattactgaaatatcagttggcacttgttttccatgtttttgaagatgactaataactcttgtggcaaggcggtcattatagcaggcaatcgccgtaatatcattattactattaagcatcatgtcgacttttttgataatatcttcatagtcttcgcttgattggtacataataacatttgatttagtagtggggatattgttatcttgataggctttgatcattccagtcatgcggtcaacgccttgctgatcatctatttggaatactcctaaaatattagtatgtccgaggctaaagaggtattttaccaaattctcctctgcttcccggtcttttgtcagtaaagaaggaaaatcaaagccaggataagtagagtgaaataggattgttggaattttatatttctggacttgccgataaaggtctaagttaggattaggcatggcgctttcagtcggctcaataattaatccagcaatttgaagatccaacatatttaagattgtttggcgttcacgtttatggtcattaagcgtatttccaacaatcattgagtaaccttgttctgttaccacactatcaattccggaaatgattggagggaagatatagtcagccatatgagtgctgattaccccaatgattttatttttttcgctttttgtccaatcgcgttgccagtcttgaacaaacatcccaccaccttgaatacggtaaatatagtgctcgttttcaaggtccccaacagcgcgacgaattgtataacgggacacattaaaacgtttcattaaggcactttcagttggcagtttttcattgattttatattttccatcaataatttcgtttcgtaaagtttgctttactgtttcatatttcacttccaatgctttgcgctcctatcttaataaaagtagttttgaatatataaaaaatgctccatataattagcaacctgctaacgcctatgaagcatttgattgattttatcttgatatttagaaccgacgcttctttggattttcgattggcttgttatccaaatcggtccgtactactagaacatcgcaaatggctgttctagtaacaaattcggtaacagaaccgatcaaaattcgttcaacagcgtttagcccagtagcaccaatcatgatgaggtcagcacccatttcctttggcatatcccgagcaataattgtctttggagcaccatattcaatggagtaactagcgttttcaacaccgtgctctttagcatagtcgatgtacttgtctaaagtcttctttgcagtttctgtaacttgttcaaccattgaagtatcgaaactagaaatattttggaatgcacgtgtgtcaacaacgtgaagtaaacgtaattcagtgtctgcaccattacgttttgctacagcaacagctttcttaaaagccaattcagcttctttagaaccgtcaacaggaactaaaatgtgtttgtattcttgtgccataattgtagtgccctcctgaaatctttatattatatacttattatacactttttcactattgagcgtaaagcgcctacgaaacattacttgcgatgatttatgcgaaaatcagcagtaattgcgaaagacattaacgtttcgctgacacagccaatgattaccataataactagaaatccagtattgtttgtccatccagaaatgatacttagaataccgacgacggtcatcacaatcccccaattttttaattgtggagctaaatatttgcttttagtaggatcgaaaataagaaatggcttatggatgtgggttaagagaaagactccttcaaaaagagcaattaaaccaaatagagtcattagaagtggtaacaacataaaaatctatcctatctataatgaaattaaaatgagggtgagaaaaagcaaaaatctttctcaccctcactaaatatgtacgaaaactccgttggtgccgttaattgtcattcagtgttgacctgtgtttaagacaggtgggacacggctgcctaatattcaactaccaagtgtaaaggcatgttgtccaaaaggcaatgcactagtcccaaagtaataagactgtaaggcaaacctgcgtttagacaacgcgtacactacagaattttcacttttataatagcatttttaagtggttgatgcaattatttgctcgggtgatatttacctcgtaaagtatgttgctgggccttccgtaattgccaatattgccggcctaaactggcttcaaaacgaccattattttttggctggtaatattgagcatctttgattcggtcaggtaagtattgttgagctacccaatcttggggatagtcatgagggtaatcataatctagtccatggcctaacttagcagctcctttatagtgggcatctttaaggtgagctggaacgtcaccaaagccaccttgccgaacctgagcaagagcttcgtcaattgcattaattcccgaattggattttggtgacaggcataattcgatgacagcatctgctaagggaattcgtgcctccggaaagccaactcgttctgccgtttgaactgccgtaacagctcgttgtacagcaggcatattggcgagcccgatatcttcgtaggctgtgatcattaaacgtcgtgcaataataggcaggtcaccggcttcaattaaacgtgcaagatagtggagggctgcatcagtatctgacccgcgaatagacttttgaaaggctgagatgacatcataatgagcatcgccatctttgtcagcggataacgcctttttctggacgctttcctcaataatcggtagcgtaagatgtattttcccatcttcacttggatcagttgatttggccgcaagttctaacccatttaatgcacttcgaagatcaccattggtcgctgctactagttggtcctcggcgttttcttcaaggactaatggtagattacccagaccgcgttctttatcaactaatgcacgctggatagcggtcttcatttcatcagttgaaagtgagtaaactgggaaaatttgcgtccgactgcgaatggcgggattaatactaatatatggattttctgttgtcgccccgatgaggataattcgtccgttttcgaggtgcggaagaagaaaatcttgttttactttatctaatcgatggatttcgtcgagtagtaagattacagttccgctcatcttagcttcttctgcgacgatttgtaaatccttttttgtatcagttgccgcatttagttttcgaaaagcatatttagttgaaccagcaatcgcactggcaatgctggtcttaccagttccgggagggccgtatagaatcattgaagaaagcatttttgctttaaccatgcgtgagatgattttacctggtccgacaaggtgttgttgaccgaccacttcatctaacgttcgcggccgcattcgataagcaagtggttgttgcatatattagccacgatcctttctatggaagagatggtggaaaaaactttgatgttgatcattgtttttttcagtcatactactatttgaatttaccagattaggatatcgttttttgacgtcgactggtgattggtaaacagctgtttttgccgccacgacaactgctaatgagcctgggtcagttttatattctggatcagttttcaatgtaaattgagcattatctttagcagcagtttgaatgtatggatgaatttcgtcgtgagggagattaccgttgataaaaacaaggttgccaattccacgatctaactcggcagttaatgcctttgtccaatcttgttcctgtagttcttgaacactaattgttagacagacgcgttcacggaatgttccgagatattttcgctgttcatcgggcttgatttttggtgtaccgtaaacagcattgtcaattcgctgttgagcagcacttttttcttgttcagacatattgaacgcctccttatcatgcaattgtaacacgaaatgcagaaaactatatttcttgataatgttataatttttgttatatcatgactatgaagaaacaaaagtaggctaacatataagggaagtgattattatgtttagtgcagtattttgggttttagcattttggtttattgtcaatctagtctggacaattgcgcgccttaataatcggatgatgtcaagaacgtttgcctggataaatgtagtggcagtagtaattggtttttggacgttttacgctgccagcaatggcgggggcggaattgctccttggtttcggttgatgaattggactaacattgtccttgcgatttttcaattttataatggataccgcccacatcaatatagtaaaaaatcaggtggattatagaatgaagttagccacccagttggtggtaaataaaaaacgccattcggcgtgacatcaggtatcatattaagtgaaccaaacctatatgaaaggatgtccgtcaaatgacgcacttaaatgataccatgtctactagtttattaactactcataaaaagaatgctcatcttactaaagaagaacgtgtgatgattgcgactttaaagtcgcaaggactttccaatcgcgcaattggtcgccaattaggagttaatcatcaaacaattaataacgagctcaaccgtggtacggtccgccaacttcgtcgtcaaaaatctaatggtaagatttacgaatattcttactacatctatagttatgaagctggtcaggccacatatcttgaacatcaccgccattctggtcgtcgtcgcttatattattcttcaaagcaatttttacgattagctgatcagctaatgcttggtgagtttgacgaccaccattactccccacaagcggttatttataaggctcgagatttaatgaatgatggcaccctgatcccaaagtcggttgtaactttatatcaatggattaatgagggtgtgcttcgtacgtccaatttagacctctttgaaaaacctaaacgtaagcatcatcgaactcatccgcaagctaaaaggtgcttagggcctaatattgctcaacgacctcaaactgcggaccaacggtccgaaattggccattgggaactagatacagttcagggacagaaaaatgacagtgttgtactagtaatgactgatcgcctttcacgagttaatatcacgagtaaaattgctggtaaaactgcgcatgcagtaaatcagttctttataaatttacgccagaaaatgggcacagatgcttactatcgcatctttaagacaataacctctgacaacggttcagaatttagtgagttaacacaagttcacgatcatgttttctatgctgatccgtattccccttgggaacgtggatccatgagatcaataaccggtttctccgcaaggagattaccaaaggtgaagctataaataactatagtagtgctcagatcatagcgactaatgattggatgaatcactatccacgagctatgtttaatggacattcgtcaatggatatctatcgtaaggccttctaccaagagatatcacagctccatcaaccaataatcaattggtcagtattatttatttgagtccagtggctaacttattcttgaaatttagaatagtaaaaaatcatagctctaattaaaaagcttataaaaaggcgaggctgagagaaaacttttgttttctctcagcctcaactgcttttatgaacaatagtaagataacgtggaaaataaccacaaggctcgagtctaagtacgaacgataatcagcctgtgccgtgctaatcatcgtcctagcttagccaaccgccttgtcgaggaggttattttccactcgcctttggtgttttattttacaatttcacaaaattcgattgtttcactgttaggaccttcaatgttgaagaacttaattcccttatcccagaagtcaaggtgttgaacttcatcgtcctttaggttgaaaccttcagccttagcagccttgaaagccgcgtcagcatcactagtattaagggaaatgtggttaatagcacccgtttcgtgaacggcaccgtcgccagtccagatttctaaagtgaggtgaccatattgcatgaaaacaacttcatttccttggtcatcagtatcaaattcgccaagtttcttgaaaccaagcttttcccaaaaagcaattgtttttgccatatcatcggttggaatcccaatgtgttgtacatcgtcaaagtaacctgctaaactcttgttaaatgccataataaatcactcctgtataaattttaattaccaatatcaagtgcctggtgctttaatttagggaagatatgacggtctgaccaaccagtaattgcaccttggaaggcaagggcaaataaagttcctaatccaaagttgtaaatactgccttgcatgaatgcagcgataattgccataattgttggtggaatgtatgataaccacatcgcaatcgttgcgttaccatggcaataacggaaacgaataatttggaaaaggtcatcagcggggtgtaacacgaggttgacacgctgataaattgaaatggcggttccgatgaaagcaacccctaagaagttaatgaaaacatataggataatcatcggtaaggtagtggcgtccggcataattcggttaaagatgtcagagaaccactggataaaaatagaaaatggcaacatgaaaataaaattaccaccaattcgtcgccagtcccacttatgcatcaaaattgcgttgaggatagaagttaacatccctaagaccatgaaagcccagaaaagggtcattgaattgttccctaaaacggcaatccctaggttgttttctgcggctgtccaataagcggagccaagaaattgtgggtggacgtgtgaacttgtaacaagtgttaggacgttccccattgagttaataacaattgacagtgcaaagtatgcccaactagcagttaatgaaattgttcgctcggcaacttgaccttgtactggaactttttcttgttccatttatattctcccttccaacttgaccaatcatttggtgaagttattcactttctctctacgatgaattaatttacaaccatcaaaaaatcttgtcaagcgcttcacaagttgaaatgacgggatttatcctataccaaaattattgaaacgatttactgaaagcgcaatcatcaagtgggtgtaggaaacataaatctaattagaccaattagctgaaaaagcttacaaaaaaattttgaaaggatgagatatgtgaaaataatcatttctccagcacgaacaatgcaagttgataccgactccttactttacaaagatttgccggaatttcttcagcagacaaaagacattttagggtggatgaggagcttatcttatgatgagttacacaaagtatggggaaattgcagctcgcgtttagcgatgaaaaattatcaatggctccaacaaatggatcttcaacgaaagctgacgccagcaattattgcttttactggtctgcaatatcaatatatggcgccaagtgttttctcagatgatgggttgaaatacgttcaagacaatttacggatattatcaggattttatggtattttacggccgtttgatggaataataccttaccgcttagggatgggtgacatggcgccagtgaatggatataataatctttatgacttttggggagaacaactttatcatgaactctataagaataatgatttagtaattagcttagcttcggtcgaatacgaaaaggcaattactccttatctacaaactcaagatcgatttatcaaatgtatttttggcgaagaaatagatggaaagataaaacaaaaagcaacattagctaaaatggctcgtgggaatatggtgcgatatttagcagaaaaccaaattcaaacaattgaaggcgtcaagcagttttatatcggcggttaccattttcgggaagatctgtctactgatgaaaaattagttttcgaactggtaaagtaaaagtaatcatattatttgccaatctttttgaattgtcttataaaagaattgtatacaaaactattaacagtgcactgattctattaaatttttaatgatagaagggagtcaaattatggtaggcgattctttaaataagacaggtgccaatttattaatcaaggccttgcaagagaataatattaaccggatgtatggaatagttggaatcccggtaaccgatttagcgcggctcgctgaattacgcggaatgaaatattatggttttcgccgtgaagattcagcagttaatgtcgccgcggcaactggttacttaacgtaaaaaactggcgttgcattaactgtttcagcacccggttttttgaatggattaacagctttagctcaagctactaagaattgttttccgttgattatgatttcaggttcgtctgaacgccatattattgacttatcacagggcgattatgaaggtcttgaccaatataatgcggcaaaacccttctgcaaaaaagcttatcgggttgatcgagcagaagatatgggattagctgttgcaagagcaattcggacagcagtttcaggccgccccggtggtgtttatcttgatattccagctgacacaattgttcaagaagatactgctgatcaatctaattttggggtttataagttagttgatcctgcccctaaacaggtacctaatgatgaagcaatatcacgagcggttgatttaatcaagaatgccaaaaagccctttattattttaggaaaaggagctgcctatgatcagaccgaaaaacaagtgcaacaattagtagctgaaacgaatattccatttttgccaatgtcgatggcaaaaaggttaattccagatgatagtcctcattctgctgcagcggctcgttctctttcactacgaaatgccgatgtagtaattgtaattggtgcccgtttaaactggatgctttcatatggggatgccccacaatttaacccgcatgcaaaatttgttcagctagacatcgatgccacgcagtttgatttctcacagccaattagcgtcccgctccaaggagatcttaagtcgattttaggtaaattggttccggcgctattggcaactggatatcaagcgcccgcagcatggttagagcaaattgcgcaagatactgagaaaaatgacaaaaagtttgcgcaacgaattgctaatggtaaagtagcacaaaaatttggctattatggagcgattgcgcctattgctgaatacttccaacaacacccagacacctatctagtcagtgagggggctaatacgcttgacattggacgcgatatgattggaatgcagctcccccgtcatcggctcgatacgggaacttggggcgtcatgggtgttggccttggttatgcaattgctgcggtggttgaaacaggaaaacatgttgttgcgcttgatggcgatagtgcatttggttttgatgggatggagattgaaacgatttgttgatataagttgccgattacggtcgttattatcaataatggctgaatttataacgggatcggccaagttgttcccaatcaacttgggccaactactcttgatccaactgcaaggtatgatttaatggctaaggcctttggtggcgataattattttgtaagtaattacgatgagatgaaaaatgtctttgcaagagctgttgactcggaacgcccaaatattattaatgttcaaattgcaccatcgatgggaaaagaatctggccttattgggaatctaaatccaaagcttaatttacaaccacttgaagaaaatgagaggagccatcataatgactgaacaaagtgaaaatgcaccattaaaaggaattaaaattgtggactggacacgggttcaatcggggccttcctgtacttagcttttagcatggctaggagcggaagtgattaaaattgaacggactaataccggagacccaactcgtaatgagctgcttgatattaaagattcatggagcctttattatttacaacgccgtttgtaaaattaagttagaaaaatagaaaagccatttgtggtagacttttgaatacccctaaacaaaagaaaggaaaccacaaatgacttacacccatcttaccacaaacgagctgacaatcatcgcccattctttcgtgcaaaagcttaaagcgtaccgagtggcccaaatgatcaaccgttgtgccgaaaccgtttatcgcgtttatcgttacctggaaaccggtgcctcaattgctgattatcaagatcactatatgcgcaataagcaacgttgtggccgaaaacgtactcagttgtcactggctgaactcacttatatcaacgacaaaattacccaggggtggacgcctgataccattattgggcgcgctgagcgcccaattagttgtaaccagcgaactctttaccggatgtttgaacgtggccagttcggcttcgatgtccgttccttgccgatgcgaggtaagcggcacccgaatggctatgtcgagcgccgcgggaaggctggccaattggggagaagtattcacgagcgtgccaaggactttccgcactatgccacttaatttgggcaccttgaagctgataccgtccaaggcaaaaagcagcaaggggcggtaatgaccctgaccgaacgccaatcgaaggtcgaaattgtactcaatgtgcacgaaaagacggctgatgcgattaacaaacacttaagtcagtggtttcggaaattcccgcggcacttctttaaatcgattacctttgacaacggaaaagaattcgccggctggcgcgagattgccaatcaatttgaccttcacacttactttgtcgaggttggtgctcccaatcaacgagggctaaacgaaaacaacaacggtcttttatgccgggatggcttaacgaaacagctagatttccgcaatcttcctgatgaattggtaacccaactgatgagtaagcgaaataacctgccccgcaaatcactaggctatcgaactccatatgaagtattcatgtcttacatcactgatgagcaactattttctttctaacttaaattgacatttcgggtaaataaaaaggcattcccaaagaaattgggaatgcctttttgggttgaatcaaacaagtgatagctattgattacttgttgtagaattcaacgataagagcttcatcaatatcagcgttcatatcttcacgtgctggaatgcggttaagcttaccttcaagcttgtcggcatcaaagtcaacgtatgaaggacgagaaacaacagcttccacagcgttcttgatgatgtctaagttcttagacttgtcacgaacggcgatgatttgaccaaccttaacttcgtatgatggaatatcaacacgcttaccatcaacagtgatgtgaccgtggttaactaattgacgagcttgacgacgagtagtggctaaaccaagacggtaaaccatgttatcaagacgacgttcaagcaatgccataaagttggcaccgtgagtaccttccttaatcttaccggcacgaacgaaaaggtttgagaattgacgttcagtcataccgtacataaaacgtagcttttgcttttcacgtaattgtgtaccatattctgaaagcttaccgcgacgatcacgaccgtggtcaccaggagcgtaagcccgacgtgctaattctttaccagtacctgaaagtgaaacgccaagacgacgtgaaacacgccaacttggaccagtgtaacgagacataaataaattcctccaataattttagttggagtaaaataatccgattgtgagcttggcattcgtgcaggctgatttgaatctttcaccctagcagccgggttactaaaaacaccgttaggcaccagtctgttgacgagcttgcccctcactgctgcattattttacacaaagtctagtatacaacggttcgtaataataagtcaatcttttctttagaaacctcgtaacttttttagcagaatgatgaacaatataaaagtttattaaacgaagatgttttttcatatcttttaaagcacgttcattgtggtatgctataattttgaataggattatacggataattattgtgcaagagcaataaacaataaaaagtagtaggtggaaaaagtggtttttcaagtattgattggtattttaattattgttgtagcaatattagcttgcgtatatttttatcaacgacgagctgttaaacagatcaacgacttaatggaaagcgagaaaaagctagcagatcaaaaagttgaccagcagatcaaaaatgttgaagaattgcaactaatcggggatgctaaaaagcaatttgaaacaattaaaaacaagtatgaaaaacaagtgcgaccagcgatcacagcctttaataaacgagctccccaattattagcagattcacggacgagcaagttgctgacaattaacactcagattcgagacctgcaagcagatttggcaaagttaacaacaactctccaacagatccaaaaagacttacaacatcttcgtcaacaacaacatacccataagcaagcggtcgagcagattaaaaataaatatcgtcaattccaccggcaactaaatgagaagagcttcgaatatggagacagtgaaaagcagttaaatagcagattaaacgaattagaggatcaattcgctcaatttactgatttaactaataagggcgatattgaagcggctcaagagattttaaccaatttgcaatctgaaaacgataaatttgaacaagaccttaagaagattcctcagctctataagccaattgcaaccgagtttccagaacaattatccgagctaaaaagtggttataagacacttgtaaaacaaaatttccactttacggagaaaaatattgataagcaaattgaacagctccaatccaaactggatcagacgattgaccaacttaacaatttacaattagatgttgtggaacaatctaataaagatcttagtgaccagattgattacttatacggggtaatgcaaaaggaaattgatgctaagaatgaagctgttcatttgattgaagtgatgaaaggctttacaaaacacgctcaacggcaaaatgacgaacttggtgtagaattagaccggttaagtttgaattacacacttactaatcatgaacaagaaaccgtacgtgaacttggtgaacaaattaaagcaattattaagcagtaccgtgatgacgcagaagcaattgctaacaaaacagctgtttatagtcaggttcttgatcggcaaaaatctaatcaaaagaacttaactgaaattgaaaaaagtcaagaaaagcttaacgatgaagttgctaaattgcaaactgatgaacaacgtgcccgtcaaatgctgcaaaaatattccacccagattcgtacaattcatcggcaagtagaacagttgaaccttcctggcttaccaaaagattacttagattacttctttggtgtcagcgatgagattaaaaagttagctgatgaattgaatgagtataagatcaatatggatgaaattacgaagcaactaattatcgttgagtcagacctagacacattaaatgacaagactgatattcttcgtgatagtgcggaattaacagaacgattccaacaatatgcaaatcggtttagtgataacgaaaagattgcagcagcagctaaaaaatcccaagaactttttaagcagtttaactacacggcaagcttagaagcaattgcgaccgttttagaagaaatagaacctggtagctacaaacgaattgaagatacctattatcgtgaaattggtaaaaattaaaaatcaaggtgagtgggaattagcctaccgccttgtggttacgacgcgaagctagttccacgatatcttaaacaatgttcctataaataaagaggctgttgaaaaaatgaagttttttccagcttcctttttttcttattaaatgatagtgataattaatgcctaatagctaattttctgttataatataaaaccgttttaagaagagtcgaaatcttcagcagtagcctatcctatactgttgaaatcataatcagagtaggttacccatttgtaacaaccctgtgtattatttttaggaaggaaattagtatgatctattttgataatagtgcgacgacaaagatactaccggatgttttgtcgacatacgaaaccgtgagccaaaagatttgggggaatccaagcagcttacataattttggtgaaaatgcttggaaccttcaagaacaggcacgccagcagatcgcaaagttattcggggttaagcctagtgagattatttttactagtggtggttctgaaggagataactgggtaatcaaaggaactgcaatggctaagcaccgttttggcaaacacattattacgactagtgttgaacatgcagcggtaaaaaatgcattggagcaactaaaagacttcggatttgaggttacctatctcccggttgataaagagggacggatcaatcccgctgatgttaaagccgctattcgtccagatactattttagtgtctatcatggcagttaataatgaaattggaacgattcagccaattaaagaagtgggagaaatccttaaagattatccaaacattcactttatggtggatgctgttcaggcaattggtaaaggattagatgaccaagtatttagtgatcgtgttgattttgccactttttctggtcataaatttcatgctccacgaggaaccggttttgtttacgtcaagagtgggcgcaagttagagcctttgattgctggtggtggtcaagagcggacactacgaaatggaacagaaaatacacctggtaatgttgcaatggcaaaagcaattcggttagtaaaggaaaatgaagcggaatcagtaaaacgtgaacaagcaattaaagaacggatttacgaccatttaagtaaatttgatcatgtaaaattgatttctggccgcgatcaaggtttcgcttcccatgtactgtgctttgcaattgtaggagttcggggtgaaacgattgttcatgcctttgaagacaaggatatctatatctcaactactagtgcttgctcgtctaagaagcattccgaagccggaacattagctgccatgaaggttccagaagatattgcaacaagtgcagttcggattagccttggggatcaaaatacccttgaagaagctgatcagtttaataaaacatttgatgaattatacgctggctttaagaaaattattgaataaaatctgaaaggaggacataacgtgcaatatacagaaattatggttcgttatggtgagctttcgacaaagggacataataaaaagtcctttattgatcgtttaggggtaaacgtacgaaaggcccttcatagctttgaccaggtaaaggtgcatgcacaacgtgatcggttgcatgttgaattaaatggagttgactatgatcaagtgatgaatcgcttgaagttagtgtttgggattcaaaacttctcgccatcaattaaagttgataagacttttgaagcgactgcagaggcagcagcgcagatgatcgctgaacaagttgacaagccaattacctttaaagtggaaactcgtcgatcagatcaccaatttgcaattgatacctttgaaatgaacaacaagctaggaggatacctcttagataagtttcctgataaattaaaagttgatgttcaccatccagacctaactttacgggttgagatccgtcttaatgggattttcctttcaagtgaaacgattaagggtgctggtggtttgccagttggtactgctggtaaaggaatgatgatgatgtctggtggaattgattcaccagtagctgcttaccttgggatgaagcgtggcgtttcaatggaaatggttcacttctttagtccgccatatactagtccccaagctttagcaaaggccaagcaattaactgaacgtcttgcaaaatatagtggaagtattaagtttattcaggtgccatttgccgaaattcaagaaacagtaaaggaaaaagttcctgaaggttacttaatgacaattcaacggcgaatgatgcttcggttggcagctgccttaatgattaagcgtcatggtctggctatttttaatggtgaatcattagggcaagttgcttctcagacaatggaaagtatgctggcgattaatgatgtaacttcttatccggtattgcgaccagtattgtcatttgataagaccgaaattattaaaattgcccaagatattgatacctatgatctttcaattcttccatatgaggactgttgtactgtctttacaccgccatcgccaaaaacccggccaaacgttgagcgagctcgtgaatacgaaaaacgacttgatattgaagggttaatgcaacgagctcttgatgggattgaaattacggaaattcatcctggtgaagattatttaaaccaaaatgaagatgtttttgctgaattactttaattaggccttgacgaggtttgataatttagctatgatacattttaataagcattgaccgaaagagtagtaaagcggcacctaaaaagcgagatcctgagagtgagagaggattagttaaactttatgaaggtagttcgggagctgatatactgaaattaatagtaggtatgtccggttcatttaccgttatgaaatgataaagtggagtattttatactcaaattaggtggtaccgcgatgattcgtcctatcgattgtgatagggcgttttttagttaatgcacaaaataaaaatgaagattgcgttctgaaaggagtttctgccatgacagaaaaagatatgtcaaccaagtacgatccagcggcggttgaagaaggccgttatcaatggtggattgatcaaggattctttaaaccaagtggtgacaaaaaagctcacccatattcaattgttattccaccaccgaatgttactggtaagttgcacttaggtcacgcttgggatacaactttacaagatatgatcattcgacaaaagcggatgcaaggctatgatgtattatgggttcctggaatggaccatgctggtattgctacccaagcgaaagttgaagcccggcttcgtaaacaaggaatttctcgttatgaccttggtcgtgacaagtttgttcaacaagtttgggactggaaagatgaatatgctgatattattcaccagcagtgggctaagatgggtatttctgtggattatgaccacgaacgttttacccttgatgaaggattaaataaggctgttcgaaaagtctttgttgatctctacaataagggcttaatttatcgtggaacttacatcatcaactgggacccacaagcacggacggccttatcagatattgaagttattcataaggatgataagggtgcattctaccacgttaagtatccatttactgatggaactacttttaacggtaaggattacatcgaaatagccactactcgtccagaaacaatgttcggggatgaagcggttgccgttaaccctaatgatgaacggtacaaggacttagttggtaagaaggtcatggtaccacttgtcaaccgagaaattgagattattgctgacgactacgtaacacctgaatttggtactgggatggttaagattaccccagctcatgatccaaacgactttaaggtaggtaagcgtcacaatcttcctgaactgaatacaatgaatgaagatgcctccatgaacgaaaatgctggtaaatacgaaggcatggaccgttttgaagctcgtgaagcaatcgttaaggaccttcaagatcaaggttatatgttaaaagttgacccaattgttcactctgttggtcactcagaacgaacaggggtacaagttgaagcccgtctttccacacaatggtttgttaagatgaagccattagccgaagcagctcttaagaaccaagatactgatgaccgagttaatttcgttccagaacgattcgaacacacctttacgcaatggatggaaaatattcatgattgggttatttctcgtcaattatggtggggtcaccggattccagcttggtataacaaacagactggcgaagtttatgttggtatggaagctcctaaagatgccgaaaattgggaacaagataaggatgtccttgatacatggttctctagtgcgctttggccattctcgacgatgggctggcctaatactgattcagcagacttcaagcgctacttcccaaccaatactttagttactggttatgacatcatcttcttctgggtttcccggatgattttccaatcgcttgaatttacgggtcaggcaccatttaagaatgttcttctccatggtttgattcgtgacgaacaagggcgaaagatgagtaaatccttaggaaatggtattgatccaatggatgttatcaagaagtacggggtagatgccttacggtggttcttaattactggttcaactcctggtcaagatattcgttttagctacactaagatggatgcagcttggaactttattaataagatttggaacgctagtcgttacgttatcatgaaccttggtgagatgcctgctcctgtccttcctgataagagtaagtgggatttagctgatcggtggattttgagtcggttaaatgcaactgtaaagcaggttaacgaacagtttgacaagtttgaatttggtgaagctgggcgggcactttacaacttcatctggaatgatttctgtgactggtatatcgaaatgaccaaggagaaactcaataatgggactgacgaagaaaagaatgatactaagaatattcttggttacgttcttgatcagaccttgaagatgttacatccaatcatgccattcgttaccgaaaaattatggcaatcaatgccgcatgatggtgaatcaattatggttgcagattacccagttgctaatgccgaacttgatgatccagccgcaactgaacaaatgaatagtttgattgaattgattaaggctgttcgtaacattcgaaatgaagctaatgcgccaatgtctaaaccagttgacattttggtaaaagttgatagtgatcacttggcacagatgttgaatgataaccgggattacattgaacgcttctgtcatccagagaacttaactattggtaaggatgttgaagctcctaagcttgcgatgagcggtattttgactggagcagaagtttacatcccaatggctgaattagttgaccttgatgaagaacgagatcggatggaaaaagagattgctaaacttgaaaaagaagtagaacgttcacaaaagaagcttggcaatgaaaagtttgttaataatgcgccggaaaaagttgttgaagctgaacgacaaaaggcaacggaatggcaacaaaaattagcagctgctaaagaacgccttcaatcacttcaacaagcttagcgtcaatttatagtaggataattaacatttttaataataaatgaaaattatatcattttattaaataggttagactactgtgagaatgctattagctttaatatttataaatatagtttaaaattagattaaaaaggaattggcaattgctgattccttttttgattaatatgaaaaaataatcatgcatcgttcgaaaatgtttatctactgataaggattaaataattgataattaagcggtttatttagagattatttcacatatttaccatttatttattgtaattatttatcacaagtattatgattgattgtggagaaacaggaaacggtttcaactattctttttatcgatatacttcggagggaggtatttataatgactattcttagtctggcacgtttccaatttgccatgacgacggtttaccacttcttctttgttccgttttcgattggaacagcttttatcgtcgccattatggaaagtatgtacgtctcaactaaagacgaaacatacaaaaaaatggcaaaattttggggaaatattttcttacttagttttgcggtcggtgttgttacaggtttgattcaggaattccaatttgggatgaactggtcggattactcacggtttatgggtgatatctttggtgctccattagccctcgaagctttgctatcattctttattgaatcaacatttattggcttatgggtatttacctggaaaaaggttaagccagggttgcaccttttcttcatttggatgacaagttttggctctttaacatctgctttatggattttaactgccaactcattcatgcaacacccagttggttatgaaatcaagggtggccgtgcagtaatggttaattttggtgcattgcttaaaaacccccaattatggtatgaatttggacatgttatccttaacgccatcatgatgggtggtattattattgctggtttaacagcattccaacttctcaagaaccaaaaactttctgaagctaataagaagttttacaagaagtcaatgcgtttaggacttttagtatcattgattttctctattggtggaattgcgttaggggatgcccagatgcaatacttaatcaaagaacaaccaatgaagtttgcagctactgaagacgtattcacgactactggtaagcatgcaccgtggacaattgttggtattgctgatatgaaagaccatgaagtaaaaggcaatatcgatattccctatgccctaagtattttgtcataccacaaaactactggtgcggttaccgggatgaatgagctcaatgcccaatataagaaaaagtacggcaagaatcttgattactacccaccagtaaatacgctgttctatagtttccggattatgtgtgcagtcggtgcttggattttcttagtttcattagttggattaattatgacaagagaaaagagcaagaaaccacttgcacaacgccgctgggcactttggtgtattgcaattaccactttcttaccatttatcggtaatactgctggttggtttgtaacggaatttggtcgtattccatggacggtttatggcttgtttacaattgctgaaagtgtatcaccaaatgtttcagttggatcattgttaacatcaaatattgtttacttcgtattatttacaactcttgcaattacattaatttggttaattgttcttgagttacgtaaagatccatcggaagcaattgaacctaaattcaagaaggttcttgacccatttgacaaggaggcgttctagatgagttttcttcaattattatggtttgtattgattggagtgctttttgctggcttcttcttcctagatggatttgattatggggtaggaatggcggtcgaaacacttgctcataacgaatcagagcgtgatcaacttgtgcggacaattggaccagtttgggatgcaaatgaagtatggttaatcacggctggtggtgcaatgtttgcatcttttccatattggtatgctagtcttttcagtgggtattacttaatcttaatgattatcctagctggtttaattatccgtggtgtttcttttgaattccgtaaaaatagtccaatgtcacaaaagcggatctgggattgggcattagcaattggtagtgcaatcgttccatttttccttggtattatgtttgttagcatgattcatggaatgccaattgatgctaacggcaattttcacgcaggattctttgactatttcaactggctttcagttgttggtgggattgccttattgcttttaacctacttacatggaattaattatattgccttaaagacgactggtccggttcaggaacgcgcccggaactacgctgaatttttgtactggattctttatgctggcgaagttgtctttgcactattattaatctttatgaccgactttatggctgttcacccagttggcacaatcattatgcttatattgattgttggtttctcagttttagcccaagtagaaacctttgctggtcatgaactaattgcctttatttcaagtgggttaaccttagtatctttagttgtattgatttttatcggtctcttcccacgggtactaattagtagcattagtccgaagtacagcattcttattcaaaatgcttcctcaacagaatatacgttgacagtgatgacgattgctacttgctgtcttttaccatttgttttggcatatacaatctgggcttactggattttccgtaaacggattgcaatgccagctattccggaggttaaataaaaagttatgattgatcgactactcttcaaaatcgaggggagcagacatatcatgattaagcttgtggggctttatgtcctgcaagcttttcttatccttggtcagggattaagtttggctgctttactaacaggcttatggcagggacattctcttttaagtcaaatatatggcttaggtggatttattgtttgctaccttttgcgtcatgggctaaccgaaattgggaatgattggcttgataagtattcggctaatgctgcccaaaactttcgtcagcaattattaaaaaaagtctttgcgcttggaccggtaattgttcagcgggagggaaccggtaatatggttactctcgctcttgatggcattaaagaagttgaaaattatattcgactcatctatagcaaggtgatcagcatgatgattattccagtcattattttggttgtctgtttttggctcgattggatttctggcattgttatgttgttagtttatcctttgattgttttattcatgattattttaggctatgcagcgaaggctaaggcagatcgacagtttgcagcttttcaaatattgtctaatcactttattgattctttgcgggggattgacacattgaagtactttggccttagtaagaagtattcgcaaagtatttatcggtcaagtgagcgttttcgcaagtcaacaatgagtgtgattaaagtagcgatgttatcaacgtttgctcttgatttcttcactacattagctattgcaatcttagcagtctttcttggcttacggttaattaacggtcacttattgctattcccgacactagcaatcttgattttggcaccggagtattttttgccgattaggaactttgcaagtgattaccatgcgacgttgaatggtaaaaattcatttcatgcggttcggcgaattcttgagatgccattaccaaagaagccgactgttgaattacaccagtggacaggagtcgatgggttaagttttgagaatgttgagtttatgtatcctcaaaatggcagtgaattaacaaaccttgatttaactgttaaggggaatcaaaaaattggcattattgggatgagtggggccggaaagacaactttaattaatcttttaagtggctttttagcgccgacaagtggccaaattaccattcaaggaaaaaaagtaacgactttggatattcatgactggcaaaaacagattctctacattccacagactccctatatttttgcagatacgttaaaaaataatattgccttttatactccaaatgtcagtgaagacaaaataaaagaagcgattcatgttgtcggcttagatgatcttgttgctgaattacctcaaggattagggacgatgattggcagcggccaccgagcattaagcggtggacaggcacagcgaattgccttagcacgagcatttcttgatccagaacgtcgggtaatgatttttgatgagccgaccgcccaccttgatattgagactgaactagagttgaaaaaaagaatgcttccgttgatggaaaataggttagtcttttttgctacccaccgtttgcattggatgaagcagatggactacattttagtgttgaagaatggcaagttaattgaacaaggaacgtatcagcagttgcttgatgaacatggttactttacagaactgatggaccaaacacgcggaaaggagataacccatgaataagattcctttacttaaagcaatgaaacatgatcggtgggtgaaacccttcctaaagcgttacaagtggaccttggtattagcaattaccctggggattgttacctttatttgtgctagtggattgatgttcaccgcgggctatttaatcagtaagtccgcaacgatgccttttaatattttgttagtatatgttcccatcgttcttactcgtgcctttgggatttttagaccggtgactaattattttgaacgattggttagtcataattgggtttttaaaatgacttctgcatttcgtaaaaagctttatgattcgttagagcaggatgccgttttctttaatagtaagtatcgaattggagatattcttgggttactttcagaagatgttgcccacattcaaaatttatatttacgaacgatttttccaatgttggttgcatttgggctttatgccattatcgttattggaatggggataatttctccactaatgggtcttttaatgttaattctatttgggttaatcatcattgctgttcccgtgtggtcagtgcttgttaatggtgcacgccagcaactagaaaagcaatataccaataccttgtatgctgatcttactgataatatcatggggattacagactgggtatttgcggggcgcagtgcggattacctgcagcactataataaaagtgagaaaaacgtactagcatctcaaaaagcgatgaaacgttttgagcattggcgtgattttattcttcaggtaatgattttattggtggttgttagccttattgtatggggagcagcacatttcggcggtcattggggaggcagtgcaaattggattgcggcctttgttctttgtgtctttccccttgatgaagtattgtctagcttgccagcagctgctcaagaaactaatgtatatacggattcattaaagcgattgaatgaattaccacaaccgcctgctccttctaaggttaatattgagattgccgctccttatcatcttaaaattacagatgtttattatcgctatcctaaaacagagaagatgatcttgcgggggattaatcttgatgttaatccaggtgaaaaacttgccattcttggtcgcagtggggctggaaagagtacgttagctagtttaattcgtggagaccggaagcctacttcgggcactgttactcttaataatgtgccaacgggtgaatttggtgatgagatttcgaattatattgggatcgttcaccaatcgccatatttgtttcataccacaatcttaaataatattcgtttgggaaatgaagatgcgacagaggatcaagtatgggatgttcttgaacgtgttgggttggccgctatgattagacgactgccaaaaggacttcatacgatggttgatgaggcagggttacggttttctggcggagagcgtcaccggttgtctcttgcccggattttactcaaggatgcgcccattatccttttagatgaaccaactgtaggtttagatccggtaacagaagaaaaggtaattgagacttttatggagcagctacaaggaaaaactttgatttggattactcaccatttacaaggcatagaaatgatggatcaagttgtttttatcgaggatggtaaaatttcaatgcaaggcagcccggcagaattacaaaaaacaaatgaacattaccgggcgttaaaaatggcagatgagggtatctagctagtttaggaatgttataataaagtaggactattaatgaagggatgaatagtaatgaaagaagttgttgtacttggagctggttacgctggcttaaagacggtcgtattattacaaaaaaagctaaaaaataatgttcatattacactagttgatcgtaataattatcattatgaagctactgatttacacgaagctgctgcgggaacgcaaagtgcttcaaggatcacttatccaattagtgatgttattaatccacaaattactacctttatccaagatgaagttgtaaagatcgatcctgataaaaagacagttaaacttgctggtcatgaagagctactgcactatgattattgtgtattaggactcggctttgtttcagaaacctttggaatccctggtgctgaagaaaatgcattaccgatgactaatgttaaagaagctttagcaatttatgaccatatcattgccaaaatgaaagattatcgtaccactcacaatcctgatgatcttcaaattgttatttgtggtggtggatttactggaattgaattagcaggggcgcttgttgacgctcgagcaagttatgccaaaatcgctggagtttcaccagatgaaattaaaattacgctgattgaagcttcaacaagattacttccaatgtttagtgaaaaacttgccgaatatggggtaaaccttgttaagagccttaacgtgcaattgcttgatggttcacgaattagcaagattgaacctgggaaggtcatctacaagcatggagatgatgatgaagagtcccttaatgctggtataattatctggacaactggagtaagtggtaatccattgatggaagaatgtggctttgatgctaagcgtggccgggtaatcgttactgaccacttaacagatcctaagcacgatgatatttacatcattggggatgttgctgccgtaatgccaccggatggtaaacgcccatacccaactactgcacaaatcgctctagcaatggctgattacacggctgaagacattgttagccgtattaagactggcaagcatgaagctaagccatttacttacaagtccttaggaacagttgcttccgttggtaatacgcgggcatttggtgaagcaatgggtcatgaattacgtggatatcctgcttcagcaatgaagaaaattattgctgaccgttccttgttagaaacaggtggtttgaaagagctatttgctaaaggacgctttgacttatatcactagaaaatgaatgaggctgagaaaaaacttttgttttttcaacagcctcgtttttatgcttatatgctaaaaaggtatggttataataaataaagggtgaaataaatgattaaaacttatgatgaagcattatcttttattcatggacgaacacaattcaagaaaattccaacactcacacggatgaaacgattcttggcagaattagggaacccacaagaaggacttaaatacattcacgttacaggaactaatggtaagggatcaaccgttgcaatgatgcggtctgctttactggaaagtggccttactgttggaagttttacatcaccttttattacacgatttaatgaacgaattgagtataatggaatcccaattagtgatgatgatcttttaagattagttcaaaaaattgcccctgttgtcaaaaaacttgatgatacattagaaacaggcggtccaactgaatttgaaattgatacagcattaatgttttgctacatggctgaaaagaagcccgatgttatattgcttgaagtggggattggggggctatacgattctactaatgtaattacgccagttgttagcgtgatcacgacagttggctgggatcatatgaagtatttaggtgatactttagctaagattgcggctcaaaaagcaggaataatcaaaaaaggtgtcccagttgttttaggtgctctcccaacagaagcgcgcgaaactattctcgcagatgcaaaggagaaaaaatccccggtttttgaattaggaaaagactttactgttcacaaacttaatggtcatcagttccacgcaaaaattcggtatcaaggaaaaaatctgaaaaaaatagaaataattcttgggttgccaggcgactatcagatagaaaatgcagcagttgctttgatggctcttgagctttttatggagaagcgtgggctggcaattgatcgtcgtgctttgatagcgggattagaaaatgctgcttggccggggcgattagaagaaataaatactactcctctggtcttactagatggcgctcataatcttcctggtgtccaggccctggttcatactattaagaatgattttgccgatcgggaagtttacctcttggtagcgattttggctgataagcaatatgaattaatgcttggggaattagcaagcttggggaatattcacttaactgttactcactttgctggccccggtccaaaaagaccaagtgcagacttagcaaaagcagttgctgatattccaactaaatatcccatccagattattaacgactggcgattaggaatcgggcaggtggcaagtcaaatgagtgcggacgatgtaatgattattactggttctctttattttgtttcagatgttcgtagattctttttaaattaaaagtgtaaaagcacaaattttccgtatttaaatatatagagtgtaaaaaggagaattatttatttatggaaaatgaagtgattaacgaatatacaaaattagtctggacggctattcctgataaaccgggaacaaagaagcaggaattatgtcaacgtttcttacgtaagtgtcctactcccctagcaattaaacggctttcacgtattgaaaaaaatgagataaatgaatgggcgccagaaatgcttaacttttttgctgctattgaattagggaagatagtaactaaaagtcatgaagaaattattggccatgcttattcgagtatcgaattaggacgcaagatggttgaccattttcaaagtgaagagcaagaaagtgtttgtattgcctgtacagatatccataatgagataattgattggaaaattttgtttgtaggcggcggatgcgaatgtattctttatcctgataagatttttcaatatgcgctccggtgttcagctcaaggaattattatgatccacaatcatccgacgggagacattcatccttctaagcaagatgaatcttttactcgccgcttagaacgaggatgtgagattattggacttcatttagttgactttatgattgttggtcgtgatacataccatagttggcgtgaagctagtctcgttaatgagcttaaaaagtaaagaaacttttaatttattataataattacgctttctttgttcttattaatgtatattaatgttcgtatgtaccgagtggctatggtataatatgcacgatattaatttgattttaagacgaagggaagaagcagattgctaggaattggaacaaaaaatcttggcattgaccttggaactgctaatacaattgtctaccttgaaggtaagggtattgtattaagagaaccatcagttgttgctcgtaattctaagactaacgaagtaatcgctgttggcagtgatgcccgtgatatgatcggacggacgccagaaagcattgtggctatccgaccaatgaaagacggtgttattgctgattacgacacaacggttgcaatgatgaagtattacattgataaagcactaggaaataatggtaagccatatgttatggtatgtgttcctagtgggatcacggaagttgaaaagcgggcagtgattgatgctactcgagttgcaggtgctcgtgatgcttatgttattgaagaaccatttgcagcagccattggagctggattaccggttatggatccaaccggtagtatggttgttgatattggtggcggtactactgatgttgctaccatttcattaggtggtattgtctcaagccggtccattcgaatggcaggagataagatgaatgatgcaattgttcaatatgttcgtcaacatatgaatttattaattggtgaacgaacagctgaaaagcttaagtgggatattgggtctgcatctgttgaagctgctgaagaaatgggaacaacacaagttcgcggtcgtgatcttgtaactggattgccaaagacaatgcaagtatctgcgaaggatgtttcaacggccctccaagatgttgttgatagtattattacggcaattaaaggaacacttgaagaaacttccccagaaattgctgctgatgttattgatcacgggattgtattaactggtgggggcgcattattaaagcatttaccagatgttattgcagatgcaaccaaagtaccagtatttattgctaatgatccccttgactgtgttgctattggtaccggcgagtcattaaagagtattgatgtaatgaagaaaaagtaaaatgattctctgacagtgacgttagcgatgaatcatcattagtactaactaatgattaacggggctgagtgccaagcagaattgtttggcaggccccgtcttaattaccttgtgtatgcattggagggtcataatgcagaaatttttttccaatcgccgattagttattgctgtgataattctagttgtctgttttggactaatggcaggttctgtttctttacggaatagacgaaatacaccaccgattatccaacaatttggaaatgatattgttggctttgttgatagtgcagttgctctccctgtaaattgggcacagacaagtataagttcaataaatgggttgatgaatacttattctgaaaaccgtgaacttaaacagcaagtaactgaattagcacaaactaaagtccgtgatcagaccttagctcatgaaaataaacaattaaaacaacagttaaaacttaataattcaatgaccgactataatacagttacagcggctgtgttaatgcgcacaccatcttcatggcaacgacaactcgtaattaataaaggtcaatctagtggtattaagaagaatatgcccgttatgagtggtagtgggttaattggtcggattacagaagtaaataaaactaatagtaaagttgaattattgagtgatactagtgaatcatcaaaccgttttgcaattacccttaatggtcaaaatgggaaggtgattaacgggattatcaccggatataatgcaagaaataacgagcttgaaatgggacaagtaacttctaaagctaaaataaaaaagggtacccgagtagtaaccagtggaatgggtggtgtgacacccaagggactttacgttggtcgcgtgtcgcatgtcggtaaagatgattatggcctcgcccagaaaatctatattactccagcaacggactttaatgatattaatattgttacagttgctgaagcggcttcgcaggagtgataaattatgtatcgtttatcacgcttaaaatatatattcccaattggcttatttgtatgtctgtttttggacggagccttaagccatgtgtgggcaccattatttttcagttatccctattcaatggtgagtgaacttgtcttactatggttagtcttatcgtacttctttcaagatgatattgagattccattaattccatttgcaattgctgctggtgcagtttacgatttatacttttcgggaattttaggattgtatattttcttgtatccattagtagtcgaaataactaaaattttatctcgttattttagttcatcatttctttcgatgattatgattttctttgttgatattgtcatttttgagacgtttaattattgggcatattatttagtgaatattactaatgttggttttggcgactatcttatttatacgcttgctccaacgttagcattgaatttaatttattttgttgtcctcttctggccaattcgcgcaatatatcgctgggcattagacgatgatcaaatttaaaattagtgcttgacacaatagatattccagtataggatatttacaacatcataaatgacagtgaacagactagtagagctttaagcattgcaaagagagtccttaatgatgggaagggatcgatgctttggcttgaatcacatctgtgagttggccttctgaaagccatagtaggaagacccggggaagcccgttacagcgcggagtttattttaatgaactcactaaggctattattcgtgagaaaatagcaagatgaggtggaaccgcggaaacgccctcgtagccattttaggctcgagggtgttttttgtttcattaaaatagacttattaaggcaaatattgtgaaatgtttgtaaatatgaggtggaaccacgatgtactcgtcctctaggaggtatctcctagaggatttttcttttcctgttatttctattagtcaagaatttaaggaggcaatagtaaatgtcaatgcaatatataagtgaaattctaccttcattattccaaggggctgctcttacattacagattttcttctggacattagttggatcgctgccattaggaattttggttagcttaggacttacttctaaaattaagcctttgaagtgggtgttagaaatttatgtttggttaatgcggggaacgcctttgctacttcaactaatctttgtattctatgggttaccaattattggcattgtttttgaacgttacgatgccgccctagttgcttttattttgaactatgcagcttattttgctgaaattttccgtggtggtttccaatctgttgatcaaggtcagtttgaagcagctcgtgttttacgcctaagctactggcaaacccttcgtaaaattatcattcctcaggtaataaaaattgttattccatcaattggaaatgaagttattaacttagtaaaagattcatcgttagtttacgtaattggtcttggtgatttacttcgagcaggaaacgttgcaacttcacgggatgtcacacttgttccattgatgttagtcggattaatctatttgatccttgtaggaatttgtacattaattctacggcaagttgaaaaatgttatgcatacttcaagtaaaggagggaatctaaatgttagaagttcgagatttaaaaaagagttttggtgatcggcaaattttagatggggttaatttaacagttaaagatggtgagattctttgtattgttggtccatcaggtgctgggaaaacgaccttacttcgttgtattactggactggaaactcccgatagtggtgagtttttcattaacggtcgtcgctttgatcctcagggaacagatgcagctgaccgagtaatcggtgtggtttttcaagactttaagcttttcccaaatctttcggtaatggaaaatatcacgttagcgccgatgatggtattgaaaaaggataaacaagaagcaattgctgaagcgcaaaaactgcttgaagaattagggcttaataccaaaggaaaattgtacccctaccaactttcgggtggacaaaagcaacgggttgccattgctcgtgcattagcaatgaagcctaaaattttgtgctatgatgaaccaacatcagcgcttgatccaaacctccgaaaagatgtggctaatattattttgggattaaagaaggacggaatgactcaattaattgttactcacgatttagaatttgcggaagatattgctgatgatattttacgagtacaaccacttgatcaacgtcagaataaatagtgaaaggagatatactgatgaaaaaagcgaaagcaatttggttacttattttgttagtagtacctgttctccttcttagtggctgtgaaagtgtaacaaagcgtgctgatacgcaagatacatggaaccggattgagcgccgaaaaagagtaattgtcggccttgatgacagttttgttccaatggattttcgccaaaagaatggcaagctggttggttatgacgttgatcttgcccgggctgtttttaagcagtatggaataaaagttgattttcagccaattgattggtcaatgaaagagactgagttaaaaaatggtacgattgacttgttatggaatgggtattctgttaatcctagccgtgccaaaaaagttgcctttagtcgttactatttagagaatcggcagatattagtaactaaaaagaagagtaacattaaaaatctgaacgggatgacgggcaaaacactcggggtgcagaatggttcaacgggagtaaccgttttggatgagaagccaaagttattaaaggataaaataaagcaccatacaccagtactttatgatacatttcctaatgcatttattgatttaaatgcaaatcgaattcaaggaattttaatggacgaggtttatgctaattactatattaagcaccaaccaaatagtaattcgtatcgcacttatattagcaaagagctgccaatggaacattttgcagtgggaatgcgaaaaggtgacaagaccttaaagaagaaaattaatcaaggcttaggtaatttgcagaaaaatggtgaattacggaagcttaatgaaaaatggttcggtcaagataataactacttgggaccggataacactaaataaaaagagcagggacttaggaaatagtctctgccctttattgtttcctacaaacaaattaataaaaatatgatgaatttacgtaatcggtttgtaatttagtcatatttaacgtatcattattcagtatgataattcgaatgtaactaggttgcagctagtggaacccctcttgctgcattttatattgaagggagaaagagaacgtggattttaatcttgctcgtggcgtggacttgcacattatacccacaaaacaatttaagatgaatcacgtcttaatagattttgcgactccgcaaacaccgacgaatgctactgcacgaaatttattggcaaacctattagagaccagcacgcatcgctatccaacacagacggctttggctcgtcaactggcatctttatatggtgcttatgttaatttatatgttaaccggctggggacattgcatactgttcgattgcgagcaagttttgttaatgatcgctttgttgatgaagatttatttgaaaagattagtagcttaataaatgagatcattttctatcccctaatcgatgacggggaatttgatggtcctacttttaggattcaatctaataatttaaaaagtgcgataaagtcgctttatgacgataaacaatttttggctaatcaacgtcttatggacttgtactaccaaaatgattctgtaatgaaggttcctagtttcggtcaaattgctgatcttgagaacttaaatgctaaaagtttagtgtcaacgtatcattcaatgattaatgaagataaaattgatattttcgtgttaggtgacattgatccgatgcgtgctcagcaagttattgctaagttgccttttaaagatcgcgatattgctaataattcacctttatatcatcaagcattgtatgatcaagttcaaagaaaaacagaataccaacaagtaaatcaggcaaagttaaatttggcatattctttacctgtctattatcatgatgctgattactatgctggtttggttttcaatgggctttttggtggcacgccatattcaaaactttttacgaatgtccgtgaaaaagctagtttagcttattatgcctctagccggctccttccatttaatgggattataagtgttcaaacgggaattcaagcgagtgatcaagaaaaagttcaaaatatgattcaggaacaattgactgccttgcaaaatggtgattttactactgagacgctgagtgaagttcaagatagtttgattaaccaataccgtgcaggtcatgatttggcaagtaatgttttggagcaacaattagttaccaaattagtcaatgaatcggataagaactttattactgaaataaaaaaagtaaccatagctgacgtcatgcgcgttgctaaacaaatgaaacttcaggcagtttatttattaagtggtgagaaataattatatggatagagaagtttatcaaaaatttaaccagtccatttatcgtgaacaattatcaaatggtttgaaagtccagctcttaccaatggaaggctaccataagacatatgctattttaacagctgattttggctccattgataatcattttataccgtacaatcaaaaggaggcgattactgttccagacggggttgcccacttccttgagcataaaatgtttgagaaaaaagatcatgatgcctttgatttgtttggtaaactaggagctgattcaaatgcctttactagttttactcaaacaagttatcttttttcgaccactagtaacctccatgagaatttagatgttttgttagattttgttcaagatccctactttactgcagagacagtgaaaaaagagcaggggattattggccaagaaattcaaatgtatgaggatgatccgagttggcggctttacctaggtattttaggcaatttatatcccaaagatccaatgcggattgatattgcgggaacggttgaatcaatcagtcatattacaccagaaattttgatggatagttaccggactttctatcaaccaaccaatatgaaccttttccttgtaggacgcttagatccagaagaaacaatggggtggatcaagcaaaatcaagaacaaaagatttttgctcccgcagagacaccccaacggttatttagcttgaacgatccaactgctcatgatgtaattccatttcgttcattaacgatggatattgttcgtcccaaagtgatggtaggtttacgggggaccaagcaatttgatgatggtaaagaacggctccactacaaattagcaattgatcttttgttagatgttttgtttgacgatacctcagataattatttgcgtttgtataataatgaaacattagatgacacgtttagttacaattttgaaatgcaacggggctttcactttgcgtactttagctctgatactgatcagatggaacgctttgcagatgaaatcattgatattcttgaaagtgctgaccagcaaattgaagcggcgcggacaaggtttgagggaattaaaaaggcagaactagggcggttaattggcttattagattcgccagaagcaattgctaatcgttatgctggaaacctctttgccggtgctagcttgatggatgagatagcgaccttggaaactatcacgattgatgatctttatcaagttgcaaaagagttcattactcctcaaggtatttcggtataccaagttgttccgcaacatcaataaactaaacttttcctatagatttattccgataagctaatatataattgagcatgatataatatccaagagtaaagataaatgaaaatggagatagaataatgagtgagaacgagaacgatcaaaaacgactagaaatcggtaaaattttacgaaaagcacgggaagaaaagggctatacccttgatgaccttcaacaaatgactaagattcaaaagcggtatttaatcgcgattgaagatgaaaattttgatgaacttcctggtgacttttatgttcgtgcgttcattaagcaatatgccaatacagtgggcttagatggtaatgaattattgcaaaaatacgatgatcaattaccacagactaaaacggaagagtattccgaccacttggctcaagcagttgaaactcgtgcaaaccaacgaaaaactgttagtgggagcgtagataaagttcgtaactacatgccaacgattattattgcttgtgtgattgttttagtgttggcagctatttggattacggccattgctcgcaatcatcgcgattcttctacacggattgataatagttcagtatctgtttctggagagagtcgtaagaaggcctctacctctgctaaaaaggcaagtacaaagcaaagcaaatcaacggcaatcaagcttcaagaagcacctaatcggaatgacacaagcgttacttacacagcaagtcaacttactaaagacacaacgctacaaattgaaccaagtgatcgttcttggatgcaagtaagagcaaataataatgatttattaaacagaactttgaataacaatgaaaaaactagtgtgaaaataagtcgtgatacaacttcattaataatcacggttggcaatgcccgggcaacaaaattaaaactcggtaatcaagaaatcgactttactaataatggccgttaccagaacacgcggaatgtaacgattaactttggacgtacccaaacaagcagcagttcagcaagtcagccgtcaaatagctcaagccaagcttcgtcatcctcggcacgtcctaataatgctactcaaccgtctgctgctaataataacagtcgtcctcagacaaatgctagtcaacaaagtaatcaaccaactcgttaattaagaggactaaaggagttagaacattgaatttaccaaataaactaactgttatacgtttaattattattccctttttcttattattaatggtgctgccattacaaagttggggagctgtaagtttttggggagcaactatcccgatggctcagcttattgctgctattttatttattgcagcaacaattactgataatcttgatggacaaattgcgcgacggcaccatcttgtaactaattttggaaagtttactgatccgcttgctgataagttgcttgtcatgactgcatttatcgttttaactggaaatggtgttgttccatcatgggtaacttcaatcattatttggcgagaattgtctgttacgggcttacgtttattgttagtggaacaagacggggtagtattagctgctaaaatgccggggaagattaagacaactactcagtttattgcaattatcttcttactcttaaataatgttatttttgctatttggaatattccatttggccaaataatgttatatatttgcttgttctttactatttattctggagtggattacttcatccagggacgcgatgtcttttcggatggatttaaatagaatatggagggtgagaaaaaacttttgttttttctcaccctcatgttttttatattcatagttttaagattttagtgaaaatgactatactttacgtatatatattaataggggatgaagttttatggatgcagaaattatctcagtaggaactgaaatagtccttggacaaatagttaatactaatgccgcgtacttagctaacagactaacccaacttgacttaccggctacttatcaaacaactgttgacgatcaatcacagagattagagcgggttattaattacgctttgactcgtgctcaattagtttttgtttgtgggggactcggaccaactgcagatgatgttacgatgcctacagttgccaaagtcttagggaaagagttgtggactgacgaagaacactggaaatggattcaaaaaacatttgagcaacggcaaataaaaatggaaccagagaatattcgtcaagcccagtatccacggggaggcgagccacttgccaatcctgttgggcttgctctaggatgttggtatgaaactaagggtaaagttgtggttgtcttaccaggaccacccgccgaatttaaggcaatggttgaaaagagtctgattcctaaactccagcaatattttcaaacaggaaaacaaattaccagtcggacattaaactttttagggcggccggagtcacaattaatggatgaaattgaagaggctactaacgatataccagggataagcattacttcttatgttcaaccaacggcaattcaggttcgactcaccgtgcgtgacttaccagtggttgaagctgaagaaaaaattgatcaggcacaaagagcaattcttgcagttgaagaaccatttttctttggagcgggggatgaccttacacttgccaaagtcgtcgttgaacaattaaaaaatcgcggatggaaattgacagcagcagaaagcttaacaggggggatgttccaaagtactatttgttccgtaccaggagcctcgactgtttttaatggtggttttgttacctatgctgctagtgcaaaagaaaagttattaggaattccccacgacactattgaccaatatggggtagtgagttctgaaactgctgcggcaatggcagaagggtgtcgacgaaaattaaatgttgaagttgggattggctttactggtgtggccggcccagatatgttagaaggacaaccagcggggacggtctggattggactagcaatgaagggatgcccaactaaaaccgttcaattacatcttgcatcctatgttggaagacaggcgattcgtacattaagtgttcagtatggacttcaattaatttaccgtgaactaaaaaaataaacgaacttttgttcacttttttcttgtttttttggctaaaactgttattattagttatcggataaaccgtaaaaaaaggaggaatttgatttggctgaccaacgaaaagcagcattagatgttgctatcagaaagatcgaaaagaacttcggtaagggctctattatgcgaatgggtgacgccactgatatgaaggttgcttcagtttctagtggttcccttgctattgacaaggcacttggaattggtggatatcctcgtggtcggatagttgaaatttatggccctgaaagttctggtaagactactgtagcattacatgcagtagcagaagtacaacgtcaaggcggaacagcagcctatatcgatgctgaaaatgcgcttgatcctcaatatgcagaagccttgggtgttaatattgatgacctattgctttcacagcctgatagtggtgaagaaggattggaaattgcagatgcattgatttccagtggggcagttgacttagtaattgttgattcagttgcagcattagttcctcgtgctgaaattgatggtgatatgggtgatacccatgttggattacaagctcgtttgatgtctcaggctcttcgaaaactttctggcgaaattaataagacaaagacaattgccatctttattaaccaaatccgtgaaaaagttggagtgatgtttggtaaccctgaaacaacaactggtggacgggcacttaaattttactcaactatccggatggaaattcgtcgtgcggaacaaattaagaatggtacggatgttattggaaataaagctaaagtaaagattgttaaaaataaggttgctccgccattcaaacggtgtgaagttgacattatgtatggtgagggaatctctaagactggtgaattgctggatatggcagttgaaaacgatcttgttgacaagagcggtgcatggtactcatatggtaatgagcggattgggcaaggtcgtgaaaatgctaaaaagtggcttaaggaacacccagatagcatgaatgaattaatggataaagttcgtgttgcaaatgggatggaaccgttaaatgaaaagtcaacgaaagaaactgctgatgataaagccagtggtaagaccagtgaaaataaacaagaaacaattgaagaagcaagtaaagaataaataataatatttgaagttgaaattccctaattttttagcattaatagctgaatattagggatttccctttttatactggctgtttaagcaattgataaattcaatagttgacaccttagtgtggcaagattaaaatttaacttgtgtgatgttttttgacgttacacggtgaaattaatttattcataccaacaacataatagttgaagcggaggtgaaatagtgaaaattttaatgttcgccgcgcttgctatggttgtcggaattattgtcggctatgtaattcgcaaggtttcatatgaaaaacaagttgcagaagcacataatgatgctaaaggtattatttctaaagcaaaacaagaagcagtaacggcgaaaaaagaagctattttagaagcgaaagaagagagtcatcaataccgcgagagagtggaagatgagttaaaacagcggcggagtgaggtccaacgacaggaagaccgattactccaacgggaggcttctttagatcataaggatagcgctctagaaaaaagagagaatgcagttggtgttcgtgaacgtaaattagatcaagaaaaagagcagcttcatcaatcaaaggaacaagcagaagccttaattgaacaacgcaaacaagaagttgaaaaagttgctcaaatgtcacaagaagatgctaagcagttattattatctgaagtaaaagaacagttaaaaactgaacgagcagtaatgattcgtgacagtgaacaagaagcggaactttctgcagaacgtaatgcaaagaaattaattgttgaagcaattcagcgtagtgctgcggatgttgtctcagagacgactgtttcggttgttaatcttcctaatgatgatatgaagggaagaataattggtcgtgaaggtcgaaatattagaactttagagacgttaacaggtattgatttgattattgatgatacgccagaagctgtcgtattgagcggctttgatcctgtacgacgtgagattgctaagatcgcgcttgaaaaattaattcaagatggtcgtattcatcctgcacgaattgaagaagcagttgataaggctcgtaagcagatggatactcaactacgggagactggtgagcaagcattgtttgatctaggaattcattcaatgcatccagacctaattaagacggtcggaagaatgaagtaccggactagttacggtcaaaatgtcttagaccactcaatcgaagttgctaagttagccggaattatggctgctgaacttggggaagatgttacattagcaaaacgtgctgggctcctccatgatattgggaaggcaattgatcatgaagttgatggttcacatgttgagttaggtgtagaactaacccgcaagtataaagaaaataaagtggttatcaatacgattgcttctcaccatggagatgtccctgctaattctgtaattgctgttcttgtacaagcagcagatgcaatttcaggggcccgtcctggtgctcgaagcgagtcattagaacaatacattcaacgtttaaagaaactagaaagcatagcaaacagttatgatggtgtcgaccatagttatgcaattcaagctggtcgagaacttcgcgtgattgtcaaaccgaagaagatttctgatttgcaggcaacaactttgtcacatgatattaagaacaaaattgaaaagcaattagaatatccaggacatattaaagtaaccgttattcgggaagttcgagcagttgattatgctaaataaactgatttttcagttcctataaagaggctgggtataaccttcagtctctttattattttaaataacatccatcatttatagagatcttgcagcaaatttagacacaaaatataattagtttattattaagattaaaaaatatattaatggggtgaaatttagtggcaaaaaaaacaacaccgatgatggaacaatatcaaaaggtaaaagatcaatatccagatgcctttttattttaccgacttggtgatttttatgagctatttaatgacgatgcggttaaaggagcgcaacttcttgagctaaccttaacaacgagaaaccatagtgcaaaaaatccaattccaatgtgtggagtgccccatcgcgcagttaacaactatattgatattttaattgataagggttataaagtagcaatctgtgaacagatggaagaccctaaaaaggcgaagggaatggttaaacgagccgttacccgtttaattacacctggaacgcaaatggatttaaatggtgaacaggcacgtgataacaattatcttgcagcgattagtggacaaaatggggtatttagtattgcctataccgacttatcaactggggagcttaaaacgacaagcttaaataatgcaaatgacgcggttaatgaattggttaatctccaaagcaaggaagtagttgtggacggtgagttgccagctgaaataacaactcagtttaagcaacgaaatattcttcaatcacatcagccaacggtccttaaaaatgctgagatcagctatcttactcaagaccttgatgatcaagcccaacagcacgttgttgcgttacttgtgtcatacttattaacgacccaaaagcgctctttggcccacctgcagaaagcaattgcatatcaaccaagttcttttatgaagatcgatcactattcaaaaacaaatctcgaattaatgcgcaatatgcgaagtgggaagcgtcaggggaccttggcatggcttttggatgagacaaaaacagcaatgggcagtcgtcttcttaaacggtggattgaccggccgttgattaatcaaaatgcaatcagtgaacgacaagataaagtccaagagttattagaccactattttgagagaagtaatttgcaacaagagttaattaaggtatacgaccttgaacgcttagcaggacggattgcctatggaagtgttaatgggcgtgatcttattcaacttaagacttccttaaagcaagttcctaaaataaaatacgttttagaaacccttgattcacctgtctttgaagaattgcaaaaacaattggatcccttggacgatgtggcagatttaatcgatcaatcaattgttgaagaaccgccaattgctgttactgaaggtggcgtgattaaggatggctataatgaccaattagaccaataccgtgatgcgatgaataatggaaaacagtggattgcggacctgcaagaacatgaacggaaattaacgggcataaataacctcaaaattggttataatcatgtatttggctattatattgaggttacaaaagttaatcttaataagcttcctaaagatcgctatgagcgtaaacaaacattagttaatgctgaacgtttttctactccagaattaaaagaaaaagaggcattgataatgggagcgcaagaaaagtcaacagccttggaatatgatatttttgttaaaatccgtgaacaagtcaagggacaaattacacgcctgcaaaaattagcacaacaacttgcggaattagatgtactccaaagctttgcggttgttagtgaagactaccactttgtccgtcctaaaatgaatactggtcacgtattaaaaattaaagatggtcgtcacccagttgtggaaaagtttatgggacaccaggaatatgtgcctaataatgttttgatgggagaagataccgatattctcctgattactgggccaaacatgtcagggaagagtacctatatgcgtcagctagcattgattgcggtaatggcacaaattggttgctttgtccctgctaaatccgctgaattgccaatttttgatcaagtctttacgcgcattggggcagctgacgacttaatctctggtgaaagtaccttcatggttgaaatgatggaagccaataatgctttgacccatgccacggatcgtagtttgattctctttgatgaaattggccggggaaccgccacttatgatgggatggcattggcgcaagcgattattgagtacgttcatcagcatgttcgtgctaagacgctattttcaactcactatcatgaactgacagctcttgagaatagcttgacgcggcttaaaaatgtccacgtaggagcaacggaaaaagatggggagttagtattcttgcataaggtaagtgcaggtcctgcagataagtcttacggaatccacgtggctaaactagcgggaatgccatccttattgttaaaacgtgcagatactattttgcaaaaattagagcaaaaggatgtaaaactaccgaatgcgcctaaaccggcaacagataattaccatacagaaccaatatcagcaaagataaatgaagcggcaccggtaaagaaagagtctgcaccagttgttgaagataatggtcaacttgaattatttgctactcaacctgagaaaaaagaatcgagtgttgatcggcggattttacatcaattaaaagaacttaatttaatggggatgacacccatggatgtaatgaatcaaatttataagtggcagcagaaattgaaataaggtgatatttaatgggaaagattcatgaattagataatattttagccaatcaaattgctgccggtgaagtaattgaacgtccagcatcaattgtaaaagaattagttgaaaattcattggatgcccatagtcaccgtgtagatattattgttgaaaattcaggtttagacagtgtgcgcgtgattgatgatggtgacggaatcgctgctgaagatattagactagcatttcaccgtcatgcaaccagtaagattaattctcgccatgacctctttaaggtgcagacgatgggctttcgtggtgaagcgttacctagtattgcttcagtcgctgatgtaacgcttacgactgcgcaagctggtcaagaagaaggaacaatgattcatttgcgaggaggaaaagaattagtagtgaagccggctggtgcgcgtcaaggaaccgatattaaggtaaccgacttattctttaatactcctgcgcgattaaagtacttaaaatcacctcaaacggagctaaccagaattacggacatcattaaccgacttgcccttgcaaatccagcggttgcttttagctttacccataatgggcgggaattatttcggtcggcaggtaataataatttacaacaagtagttgccgcaatttatggcgttcaagcaggacgtaagatgcttgagataagtggtgcagatgatgattttaaggttagtggttttgtttccttaccagaattaacacgtgcatcacgtcaatatataacaatcacaatcaaccatcggtatattcgtaattttgaattaacaaaggcaattactcagggatatgaatcaaaactaatggttggtcgttatccgatcgcggtaattaacattgatctggaccctgttttagttgatgtgaatgtccatccagctaaacgcgaggttcgtttgagcaaagaacagcaattaataaaattgattgctgaaacgattcggcagcgaatagcagttgagaacttgattccggatgtcgatgctgaccaatttattcctaatgatgatgaggtagcggaccttgatcgccggttaaaggaagcatcacctgtttatcacgccgcaccgatttcggcagtgccggcaacagaaaaggcagcaactgagatttcaactccagcagctgataatccagcacatgctgacgcgcttgatagtgagattccagcaccgatcgttatccaccatcttgaagatttaaatacgctcgcaatgcaaaaatttgatgagcgttatcaaaatgaaggtgaagttacgccattttctgctccagttcccactatgactaagaagccagtaaaacctgcaaatattgaattggatgttcatgataaacaagatcagcagcaaaatcggtttcctgatcttcaatatattggtcaacttcagggaacctttttattagcacaagcaggagatggtctttacattgttgaccaacatgctgctcaggagcgaattaattatgagtattaccgccaaaaaattggggaagtgagcgctgatcagcaaaatttcttggttccgcttgttcttaattattcgactgtcgacgcaatgacaattaatcagcatctcgatacgcttgcagcggtcggattagaattagagtcatttggtcaaaatagttttattttgcgctcccatccaacctggtttaaagaggggcaagaagaagacacggccaaagaaatgattgattggttaattaagaatggaaagctaaccgtcaaagaatttcgaatgaagacagcgattatgatgagctgcaagcgggctataaaggctaaccaccaccttgacgaacgggaagctaaagccttgctgaaacggttgccgcaatgtgagaatccttttaattgtccacatgggcgtccggtaactgttcattttaatgatcaggatttagaaaaaatgtttaaacgaattcaggattcacacaccccatatgcagacgattttgatgatcatgaattttaaggaggaactaccttgtacgaatacttaacaggccttgtaactgttgttgcaccacaatatatcgttgttgatgttaatggggttggctataaattattagttgctaatccctatcgttatcaagaggatcggactaagaaggtccaagtatatgtttatcaagcagttcgtgaagataatatttccttgtttggcttcacagatcaaaatgaaaaaaaactatttatgcaattaatcaatgtttctggaattgggccaaagagtgctttagcaattttagcgaaccctgatcatcagggacttgttgatgcaattactaataataatgttaactatttaactaagttcccaggaatcgggaaaaagacagcttcgcaaattgtgttagacttacgtgataagctcactaatgaaagcagcagctcattatttgcaacaactcagcttaccgttgatgcaacagtaaatcgtgagttgaaagatgctttggaagcattggctgcattaggatacaaggaacgggacattaaaaaggttcaaaagacattaatgaaagaagaacaaatggcaactgatgaatacttaagacaagcattaaggttgcttaactaggaggtgcaagacttgtggaaaatgatcatggtattttatcagatcacccatcaggagaagaagaaaaccaagtggagataactcttcgaccacagaaactaagagaatatattggtcaacctaaaatcaagcacgaactagaagtatatattaaggcggcccaatcccgagaagaagcccttgaccatgtattgttatatggtcctccaggattaggaaagacaactttagcgatggtaatagctaatgagatgggcgttaatatcaaaacgactagtggaccagcgatcgaaaagccaggagatttggttgctttattgaatgagttgaaaccgggggatgtcctttttgttgatgaaattcaccggttacccaaagttgtggaagaaatgctttattcagcgatggaagattactatattgatattgttattggtgagggaccgactgcgcaccccgttcattttccccttcctccatttacattaattggggcaacgacacgagccggaatgttatcggcaccattacgtgatcgtttcggaattgttgaacacatgaactactatactcaagatgaactgacaaaaattatttttcgttctgccaagattttccatactagtattcaaaatgaaggggcccatgaactatctcttcgttcacgtggtacgccgcgaatcgcaaaccgccttttaaaacgggtacgtgattttgcccaggtagcagggaaacaaagcattgattcagcaattgttaagcaagcattatcgctgctccaagttgatgatcggggcttagatgagattgatcggaaaatgttgttaacgatgatcaatttctaccatggaggtccagtgggattaaaaacaattgcagcaaatattggtgaagaaactaatacgattgaagaaatgtatgaaccatatttgttacagatcggctttattagtcgtactcctcgcggccggttagtgacaccgacagcatatgaacatttaggaattgaatatccaactgatagaaattgattgaggaaaattatgagtaagttagaatttacaattaatcaaagcgatggccaagcacgaaccggaattttgcagattaatggacgacaaattgaaacaccggctttggttgccagtggagatgaactagcaaaattatcacccaaccagcttaatcaggctggtgtaagtgcagttaagacaagtggattaaagcgttggctaaaatatgattcgatgactgaaaaattaggagacctccaccaactttttcagtgggatggccttttatttgtggatttagaaactgaggaggcctatcacttagcaaagccacgcgggaaaaaacatgatggcgttcgttttcatgatccgataacgggacaattaaaattctggcaaccagaaactgctcttcaagttcaagaagcgctcggggctgatatttttcaaagctttgaccaagcaacagattattatgcgccagttgatgatttaaaagtaggggtaaaacaaactaataactggttatctgttgttaagccccaaaaaggccaagcccttggttcaattgttggtggcggcttaaaagatttgcggacagccagtattaaggcggtcgatgaggctgggttaagcggctatcggttgagtgggatccctagcagcttagatgatcaagagtttagtcgaatcattaatgaaattacgcctaaactaggagaggagaaactgcgctacctccctgctgcactttcttttgaccagctgatagaggcaattttagcaggagttgatttaattgatagcaatctagcagctaaaaaagcggctaatgggattgcattagttaatcaaggagtgacagttcttcatcttgatcgtcaacattttagcttcgattcacaagtgcttgatcgtcaatgtgcgtgtgcaacttgtcgcgcgggctattcaaaagcactactccatagtttaattaccaatcaaagtttttacggtgaacaacttttgctgcagcataatctgtttaccctcaataaattaatgagtagtctccgacaagcaattaaaaatcatcaaacaaaaaaatttgttcaagaattattgcagaatcaatagagcatatagctttttatggtaaagtttgttaaagttaatattagttaactttttgaagggatggataaactgtgaatagtttgagtagttttgttcttggtgctgcttcatctaataatgcaagtggttactcaagaattattttaatcatcttaatggtagcattaatgtacttctttatgattcgcccacaacaaaagcaacgtaaagaacatcaagagatgatgaatgaattacacccaggtgatgaagttgttacgattggccggatgcatggtaagattgattcaatcaataaggctgaccggacagttactttagattgtgaagggatctaccttacttttgatatggtggcaattgcccgtgttattaaacgagcagatgcaccagctagtgaagttccccaagataataaagctgttgctagttctgccgctgacagttctgcagatgcttcagcagatagtgctgctagtgaacctacatctgcagcgagtgctagcgatgaacaaaaaggcagcgaagaaaagtaatttaatttagatgaaaatagtcgtaaacaggcgaatattttcatcttttttatttggttgttaatcgcgtttattgctatactaaaagatagtgttaaattttattcgggtaaggagaatagcataatggcagatccattaacagcaatttttgaacaaatcaaaaaatacaataaaataattattcatcggcatcaacgccctgatccagatgcaattggctcacaagttggccttgcggaaattttgcgggcttcattcccatataagcaaatttatgttgtagggaagcatattccagggtttgattggatcggtgagatggatacgattgacaatcagacattcgatgatgcattagtaattgttacggatacagcaaatgcgccacgaattgatgatcggcgctttgataatggggacgaacttattaagattgatcaccaccctaacgatgaaccctttggcgatattatgtgggttgaaccagatgcttctagctgttctgaaatgatttatagtttttatcaacgatttgcaaaagaattaactcttccccagaaggctgcccatgccttatatgcaggaattattggcgatacaggtcgtttcctttatccagcaacaactccacgaacgatgctagttgcaggttcgttaatggcagccggcgcaaatgccgcggaaattagccagcacgaaaatgaaattaccttaccagtggcccggttatcagcatacgtttatgaaaatttgcagatattagataatggagccgcatatgttatcttaaccaatgaaattttagaacaattcggattgactgaagccgggacatccgcaattgtttctttaccaggtcgaattcatgatgttattgcctgggcgatctttgtagaacaagaagatggccattatcgcattcgtctccgttcaaagggaccaacaattaatgaattagctaagcagcacgatgggggtggacatccacttgctagtggcgctaaggctaaagatgaagcagaaattaaacaagtgattgatgaattggaccaattaacacaaagttatgcaaaccaaaaatgaaagggaaatagctatgagtgataaaaaatttgctgattttcagttacaaccttatctgttaacagcaattcaaaaaattaattttcgtcaaccaacaccggtccaacaacaagtaataccagtgattatggctggacgaagtgttgtggggcaatcagcaactggtagtggaaaaacacatgccttcctcttgccgattttttcaaagattaatccagaagatcaaaccgttcaagcagtaatcacaactcctagtcgggaattagcataccaaatttataatgcggcaaagcaacttaataagtatgctcctcatcctcttaccattcacaattatgtcggtggtacagacaagcagcatcaagttgaccaattaagtcgaaaacagcctcaattggtcattggaactccgggaagagtattagacttaatcaagagtcaggcattggatattcacacagcaaaaatgtttgtggtggatgaagcggacatgaccctagatatgggattcttacatgaagttgaccaaattgccagtcattttcctgatgaccttcaaatgatggttttctcagcaacgattccgcagaaactgcgcccattcttaaaaaagtatatggaaaatccagtaattgaagagattcctactgaagcagtaattaatccagatgttgataattggttaatgtcaactaaggggcaggaccgtaaccagctaatctatcgtttgctgactcttggtgaaccatatcttgcattggtatttgctaatacaaaagaacgagcagttgaattaacccagtatttagaaaatcaagggctcaaagtagcgatgattcatgggggactggaagcccgtcgtcgtaaacggacaatgcggcaaattcgtgatcttgaatatcaatatgttgtagcaactgatctagcagctcgtggaattgatattgatggagtatcactagtaatcaatgacgacttgccaactgatcttgaatattttgttcatcgggttggtcgtacagggcgaaatgggatgaaaggaacagccattaccttatatgaaccagcagaagatgatttaattgctaagcttgaggagcgcggagttaaatttgtaccaaaagaattaaagaatggtcaactagtaactacccatgaccgtaatcgtcggaagcattataagcggcggcaaaatgaacttgatccgtcaatgaagggttacgtaaaaaagactaagaagaaggttaaacctggttataagaaacgaattaaaaaggcgattaaagaagacgaacagcaaaaacgaaagctagaattacggcataaaattcggaaagctaagcgtgcacgacaaaaacaacatcgccgtgaacgaaatgcccgttgattttaaagtaattgttcgctataatatgacacgtttgggacatgctataactaatggaaaatttcagagacagttggtaaggtgtgacaactgatttcctagccttagtgctccccattcggataatttgatatttaaccttgggcaaccaagaagtaaagaggtaaacgaattccatcgttgcaagcagagtggtaccgcgtcaatctggcgtctctgattcgcaatggtggttttttgttttagaaggggcgatttgatgaaagagttaaagaagctaaatagtgctcaagtacggcggatgtacttgaagttttttgaagagcatggccaccaagttatgccgagtgcatcattagttccagtaaatgatccaacattactatggattaactctggagttgccacaatgaagaaatactttgatgggaaagttgttcctgataatccacggatgacaagctcacaaaagagtattcgaacgaatgatattgaaaacgttggtaagactgcccggcaccataccatgtttgaaatgttaggtaacttctctgttggtgattactttaaaaatgaagtaattccatgggcttgggaattactaacaagtgatgaatggtttggttttgatcccgaacggctatacattacttattatcctaaagaccatgacgcttacaatcgctggcgtgaagtaggcgttgctgaagatcacttaattgctgatgaggataacttctgggatattggtcaaggtccatctggtccagatacggaaattttttatgatcgtggtcaagaatttaataatttagccgatgatgatccagaaaactatcctggcggtgaaaatgaacgctaccttgaaatttggaacattgtctttagtcaatttaaccatacgcctgaagatacttatgaaccacttcctcataaaaatattgatacggggatggggcttgaacgggttgtttcgatctttgaaaatgcccctactaactttgaaaccgacttatttatgccattaatcaagcaagctgaagagtttagtggtactaagaagtatggtcaaaataaagaagacgatattcaatttaagattatcgctgatcatattcggacaattacctttgcgatcggggatggcgccttgccttcaaatgttggtcgtggatacgttattcggcggttgcttcggcgagcagttgttgctggaaagaagttgggaatcgatgaaccatttttagcaaagatggttccaacagtcggcaaaatcatggaagattactatcctgatgttcttaaaaatgctgactatattgcttcggttattgaatcagaagaagaccgctttagtgcaaccttaaatggcggattaaacttgttgaataacgtgattgctgaagctaaggaaagtaagaccaacgaaattgatggacgaacagcctttaagctttatgacacttatggcttcccaattgaattaaccaaggaatatgctgaagatgaaggactaacagttgatgaaaagggcttccaagcagcaatgacggagcagcaaaatcgtgctcgtaatgcccgtgatatggataacgggatgggtgttcaaactgatttatggacttcattcaaagaagatagcaaatatgttggctacactgatttgaccgttgataatgcaaaagttatcggcttagcacatgatggtcaacaagcggatgaagcacgaccaggtgataagaacattgaactaatttttgatgtaacgccattctatgcagaaatgggaggtcaagtcgctgatactggtgacattattgataactatggtaaaaaagttggccgtgtggttgatgtccaacacgcaccaaaccagcaaaatcttcatcgagtagaattaactgcccctattaaaaagggtgcccgttacaaactagttgttgaccgtattcgtcaccttaagattgaaaagaaccatacagcaacgcacttgttagaccaagcattacggaacgttcttggtggtcatactcaacaagccggatcattagttgaagaacattacctacgttttgactttaaccactttggtcaagtaactgctgaggacctcaagaaggttgagaacatggttaatgagcaaatctggaaggaaatcccagtcaagacagttgaaactgatattgattctgctaaggaaatgggtgctatcgccttattctcagataagtatggtgataaggttcgggttgttaagattggtgactttaacactgagttctgtggtggtgatcacgttaaaaatactaatgagcttggtctcttcaaaattgtttctgaaggaggagttggtgctggagtacggcggatcgaagcagtaacttctagtgatgcctttaagttcctccaagatcgtgatgacctcttaacaaagagcgctgctagtttgaaggttgctcagattaaggaagttcctcaccaagtagaaacattacaaaatgaacttaaagaagctcaaaagcaaaatgagtctcttcaagctaagattgctgctcaacaagctaataatgtttttgaaaacgttcaagcaactaagaatggaagtttaattgctgccgaagttcaagttgctggaatgggtcaattacggcaacttgctgatgcttggcgctcaaaggctctttctgatgttctggttcttgctacagccagtgatggtaaagcaaacttattagtggctgttagtgatgataaaactaaggaaggcttaaaagccggtgaccttattaaggcgattgcaccagccattaatggtggcggtggcggtcggtcaaacctcgcccaagctggtggaaagaatccagctggaattaaggaagccttaagtcaagctaaaggttacctcgataagtaaatcaaaaatgagaaggaaataaccatctcatagtctaagagattgaaagaaaccaatttttgagttctttcaatctctttttgtaagaacttcttaaagtaataaaaaaatactatggtggattatagaatgaagttagccacccagttggtggtaaataaaaaacgccattcggcgtgacatcaggtatcatattaagtgaaccaaacctatatgaaaggatgtccgtcaaatgacgcacttaaatgataccatgtctactagtttattgactactcataaaaagaatgctcatcttactaaagaagaacgtgtgatgattgcgactttaaagtcgcaaggactttccaatcgcgcaattggtcgccaattaggagttaatcatcaaacaattaataacgagctcaaccgtggtacggtccgccaacttcgtcgtcaaaaatctaatggtaagatttacgaatattcttactacatctatagttatgaagctggtcaggccacatatcttgaacatcaccgccattctggtcgtcgtcgcttatattattcttcaaagcaatttttacgattagctgatcagctaatgcttggtgagtttgacgaccaccattactccccacaagcggttatttataaggctcgagatttaatgaatgatggcaccctgatcccaaagtcggttgtaactttatatcaatggattaatgagggtgtgcttcgtacgtccaatttagacctctttgaaaagcctaaacgtaagcatcatcgaactcatccgcaagctaaaaggtgcttaggtcctaatattgctcaacgacctcaaactgcggaccaacggtccgaaattggccattgggaactagatacagttcagggacagaaaaacggtaatgacagtgttgtactagtaatgactgatcgcctttcacgagttaatatcacgagtaaaattgctggtaaaactgcgcatgcagtaaatcagttctttataaatttacgccagaaaatgggcacagatgcttactatcgcatctttaagacaataacctctgacaacggttcagaatttagtgagttaacacaagttcacgatcatgttttctatgctgatccgtattccccttgggaacgtggatccaatgagatcaataaccggtttctccgcaaggagattaccaaaggtgaagctataaataactatagtagtgctcagatcatagcgactaatgattggatgaatcactatccacgagctatgtttaatggacattcgtcaatggatatctatcgtaaggccttctaccaagagatatcacagctccatcaaccaataatcaattggtcagtattatttatttgagtccagtggctaacttattcttgaaatttaggaaaaaaatactatcaagaaatcctattatcagctataattataaaactaatattactgtttacttacaattgacaaatgtaaattgtgattttaataagaatatagtaaaattgatggttgaaaggaatatctggaggtgacgattgatggctacaaatgataaaacgatgttctttgattttggtcaagaacgtcaagaagatattaagcaaacattaaagacggtttatgaatcattagaagaaaagggatataacccgattaaccaaattgttggttatcttttatctggtgatcctgcttatattccgcgtttgaatgatgcacgtaacttgattcgtcaacatgaacgtgacgaaattattgaagagcttgttcggtcatacctaaagaataacggtgaaactaaatgagattaatgggattagacgttggctctaaaacggttggcatttccgtaagcgatcctctcggttggacggcccaagcagttgagattattccaattgatgaagaaaacgaaatttttgggattgatcgtgttgccgagctagtgaaaaaagaacaggtagctgggtttgtaattggccttcctaaaaatatgaataatacagaaggccctcgtgttgaagcatctcagcactatggcaagctattacaacaacgttttccagatattcctattgactttcaagatgaacgtttaacgacggttgaggcacaccgaatgctagttgaagaagcggacatttcacgtgctaagcagaaaaaagttatcgatgaagttgcagcaacattcattttacaaagctatttggatcgccatggccgccttgtgaataagctaaaatgaggtattaaaatgagtaaacaagaaaataacgaagacatgattacgttaattgatgaaaatggtaatgaacaattatttaaggaattgtttacgtttgattctgatgattatggcaaatcctatatctttatctatccagcggaacaagaaaatgacgattccgttgacattcaagcttacattatagctgataatgaagataacgatggacaggaccttgtcccaattgaagatgataaggaatgggacatggttgaagaagtattaaatactttccttgataatgatggcaacttcaaggcctaattaaaattactggataaataaaatattaacaaaagggagctgtagacacatttgtcacagtcctttttctttacaagcagaatgaaaggatcattaggatgattttaacaacctttattattttgattttaatggggtgctttattaatggtcatcgccgcggattattgacaatgacgttaatgctggggacatatatagtagcttggattgttgctcgccagggagcccaattgattggtggctggttaaaatcgttattaccaagtattggaaccccggcaactttttccgagagcttgcttgcaaatgtaaatagtaatcttttcttttataatgggattgcatttatgataatttttacaattgtttcaattctttgtcactggggaattcgtcagttaaactggataaagaggattccagtggtgggaacagttgataagatcgcaggtgggttaatctcatttttaattggctatttgattatttacgttgttttactaattatgcaattatttccagcaggttggtggcaaatgcaaatagcaaactcggaactagcgcgttttatgattaatcaaacaccaggaatagcgcatttagtaattgatacgctagtacagggaggataaaatgaacaacaaaattttagaaacattagaatttgatcgaataaaaggacaactggcacaataccttgtttctgccgctggtcatcgcgaattgacgcagcttgttccacagactgattatgaggcagtcaaagaacttttgacagaaactactgatggggccgatattttaaggttagaagatgggattcctattccgcaattagctgatatcaaaccgcaattgaaacgtttgaaaattaaggcaaatctgaacggcacggaattagctcaaattactaaagtgctgcaaactagtatgagtgtaaaaaacttttttgatcagatgcgggagaaaaaaattaaactacgggttttaactacccaagttgaccgcctagttacaattccttcaattacccagcggctagttcgttcgattgatcctgatggacggataaatgatgaggcatcagctaaactccatggtatccggcaattaattacccaaacggaaacagagattcaccaacaaatggaaaggtatactcgtgggaaaaatgcgaaatacttaagtgaccctattgtcacaatgcggaatgaccgctatgtgattccagtaatcgcccgctatcgaaataaatttggtggggttgttcatgaccaaagtgctagtggacaaacattatatattgaacctgcagccgttgtggagaccaataatcggttacgacaagcgcaaatagaggaacggcaagaaatgcaacgcgtattaattgagttatcacaaatgattgctccttatcgacatgatattggtcagaatgaagcaattcttggacaccttgactttattaatgcaaaggcacgctgggcacatgatactaaggcaacgctaccgctcttaaacaaagaaaatcatgtttcattacggaaagcgcgtcatcccctgatcgatccccaacgagtagtgacaaatgacattaagattggggaagattaccaagcgattattattactggacccaacactggtggtaaaaccattacgcttaaaactttaggaattattcaattgatgggacaatctggcctatttattcccgcagaagaaggcagtacaattgggatctttgataatgtatttgcggatatcggtgatgaacaatcattggaacaaaatctgagtactttctctggtcatatggatggagtaaaagccattcttgaacaaattacaagtcgtagcttagtccttctagatgagcttggtgctgggactgatcccaaagaaggggctgctttagcaatggcaattcttgataatattggcagtaaaggaaccatggttgtaattactacccactatcctgaacttaaagtttatggttatgatcgtgctaagacgattaatgctagtatggaatttgaccaagaaactcttaagccgacgtataaattactactagggattcctgggcggtcaaatggattagagattgctcagcgattaggaattagtccccaggttattgatgaagcacggacatttgttagtgataatagtcaagaccttaacaatatgattggtgatttagtagagcaacggaaaaaagcacgtgaagaaagtgaaaagctagcaaaactagtagccaaaaatgaaaaagttcagcgtgaccttgataagaaactcacccgctttaatgaacagcgcgataagctatacgaacaagcacgttcaaaggccaaccatcaagtttcgatggctaagaaaaaggctgaccgaattattcatcatttgcgccagttagaagttcagcagggcggaaatgtaaaagaaaatgaattaattgatgcacaagggcaattaaacgctcttcatcatgataatccacggttgcaacacaactctgtattacaacgggctaagcaaaaacatgatttgcataaaggtgatgcagtcttggtgaaatcttatggtcaatatggagaacttttatctaagcgagggaaccacaagtgggaagttcagattggaattcttaaaatggaaattgatgagaataatcttgaaaaagtagctaagaaagatcttccacgagaaaaagatgcaaagcggcgaccacgagctgctgtgagaacgacacaaacacgaaagacctcggctcgtcttgatttgcgcggtcatcgctatgaacaagcaatgagtgagctaagtaactttattgatcatgcattgttgaataatctttcaacggtaacaattattcacggaaaagggaccggtgctcttcgtaagggaacacaacaatatttgcaaagcaatccacgagttaaatcattctcctatgcttcccctaatgctggtggggatggggcaacaattgttaatttataattacttactataaaaagtaagcaaactaaatgacatttaagaagtgatttgttagaatagcgttaagaaaaacaaaggaggaattgaatatggctgtaaacgtaactacagatcaaacctttgaacaagatactgccactggtgtcgatttaattgatttttgggcaacttggtgtggtccctgtcggatgcaatcaccagtagttgatgcattatctgataagatgcccgatattaaattttttaagatggatgttgaccaaaatccagaaactgcacaaaaattccggattatgagtatccctacattaatggttaagaaagatggtaaggtagtagaccaaatcattggttaccatagtgaagatcaattaaagcaaattttacaacaatatgttgattagaaaaaagctggagaaaaactttttgttttcttccagctttttcgtattttaaacttattttttatctttttttcgtcgctttagtagggaatgacgagtttcttttttgagggtgtcttctttttcgtcagggcgatcaacagtaatgaatgttaccatctcagatcgttcattatcagctgaactttgtggatcgttttgaatcaaaatatcaacataatcacggtgccagtcaaagatctttgcctctgcaaccgttccaagttgaaactctacttcttgagcaagaaaaccacactctaaaccaaaggaggtttcctcttcgtctctttgaatccgttcctttacaattacccctgataacctccaaacttgagaagtattgctttttttacgtaaagctaaacggccaaagccaagttgattagtgagatatactagatcctcggctgtagcaacaggatatactcgagcgagatctttaccaatccaatatagcatttcatcggtctctttacccaggatagctggtaaaatcacgtcgcgcattgttccagctcctagtccttgatgaccggctattaattgattatataatttctgactcatatccactcgctcctttttaacaatcattattattatacttaaaattcaagatcttaatagggttaaacctgaaaaacttgcaaaatcttatggagaaacggataatatagtttcaaggttttaaacgttttaataaattaacgaggtgaagagaatggataaacgaccaatcggggttatggattcagggttaggcggcctatctgtaattcgtgtacttcgtgaacaactgccccaagaatctgtaatttttgtgggtgaccaagggcattttccatatggaactaaaacaaaagaacagattcagcaattagcattacgcattggaaaattcttgttagaacaagacgtaaaaatgatgataattgcatgcaataccgcgactgcagcagctcttcgacttcttcaaaacgaattaccaattccagtaattggggtaattgaaccaggagccatggctgctacccaacatcattataaaaaaattggggtaattggcactgaatccactattaaaaatggcgcttatgctaaaacattagctaaacttaatcctgatctaagtgttatcagttctcccgcacagccacttgtctcaattgttgagcatgggcaaacaggaacaagtgaggcacaaaaagctgttgacactgaattagaagtatttgataaccaatcgattgaagctttgatccttgggtgtactcatttcccgtttttacaaaaagaaattcataataaattaggatctaatgttcagttaattgatcctgcatttgagacaatcagacaggcaaaggaattgttaactggcaaaaatcagttgagtgataatttagcgtcaagtatcaacctttattcaacgggagatgctaaagacttagttgctggtgcacaacaatggttaccaaacggatacagtaagtgtgcacatattgaattaaacgaggaaggttaaaatgaaaacaatcgtaatcgcaacaaagaatgccgggaaagtgcgtgaataccaagatatgcttgctcccctaggaattgaagtaaaaacattagccgattttgcaccaatagcaattaatgaaaatggtaaaacatttgaagaaaatgcaacaattaaagctactacagctgctaatcaactccaactaccagttatggcagatgattcgggcttaatggttgatgctcttggaggtgctccaggtgtacactcagcaagatatgctggtgatcatgatgatgctgctaataatgctaaactcttattggcgttaaaagaggtaccggatgaaaaaaggactgctcactttcatactaccatcgtcggaattaagcctgatggaaccaaattagttgccaatggtcgggttgatggccatattcttcatcaactcacaggagaaaacggttttggttatgatccgcttttttatgttgatgaattaggcaaatcaatggcccaattaacagcagaccaaaagaatcaaattagtcatcggggacgcgcattacgatcatttatgaagcaatttaatgattggtggtaataaaaatgaaaatactagttgtaagtgataaccatcgagaagaaaaaattttgacagagattgttcaaaaaatgggggatcaagttgacctaatgattcactgtggggattcagaattagctcctgatcaggaaccgatgagcaattttaaggcagtgaaggggaataatgattatggtttgtcgtaccctaatgagttggtaattaatgctgggcaagagcagctctatctaactcatggtcatttacagcgggtcaatttttctctgacccctctgatacttaccggccaagaaaaaggtgcctccattgtgtgctatgggcatactcatcagttaggagccgtttacgatcatcaaatgctaataattaatcctgggagcatcagttttcctcgtggtgaatatgctaaactcgggggaacttttgcaattattgatgcgcagcctgagcggtttattgttgattattataaccgcgagatggaagctgttcctgaattacattgtgaattcagtcgtcagaaataaaggagtgtatttttgtgattgatcagcgtttgcagactttattgctgaaaaataagcagaagtttatgatccctgccagtttagttgcaacagtaaatcaaagcaacagtttagatcatgcatttttagtccttactaaggatcggtacgctaaaattattgtgattgataataaaaaccgttactgtggtcaagtttctttggcgatgattactgaccgattattggagacaaaacggatcaatgtggagcgcttaaatgaattaaaggtcagggatgtgatgcaaaccgatgcgccagttatccaagatccaactgatatcgaagaaaatttacacctcttaattgatcagtcatttttaccggtggtggacgatcataattacttttgcggaattgtgacgcgtcgtgaagtattaaaggcggtcaattatacaatgcatacttttgggaaataatgaaaagtagttatgatataagtcaagttactttcataaaaaataaatagcgcagtacaacataggcctccagcgtccggtaaaaccgaacgttggaggcctccttctttttatcattcatttttaattaactgattaatagtctgcaagacgccatcatgattattatcaattgttgtggtatgggcagcttgcatttgaataattggttgagcattttgcattgcgtaactttgactcgtcattgctaacatcccgaggtcattttcattgtcaccaaacgtaacaatttcatttgcctttaaattaaagtgagactgtaaaagagaaagagcgttttgtttagttgcagcagcattaccgattaagtcagtattaaagcctgaattttccatgattaaggatggtggtaagtaaccatctaaggttgttgcaactttttttagatcgatatggttagcaaaattaatcgatatcttggtaaaatcttcagttggccgttgagtgaaaatttgtcggatatcagggatacgctctacattttcataaaaaagtttcacaatattgaaatcatgagcactcatcccctgatcaacataagatttttcactagtagagattactaattgattaatatcttgtggaccatagaaacggtcaaggacatgaataacccgggctaaagattcttgattaataggaaaagatttaaataatttgcttcctaaatgaataactgaaccgttttgcgaaataaatcccatcttggcggtgtagtctttaaattctcgttgcaaacgtggaaagctggatccactagcagcgacaaagtagatattatggcgttcaagttggcgaaagacctttgcaaataaagaatgattgtaagtatggtcatctcgtaaaaaggttccgtccatatcagtagcgattaatttaatactcattaggtactccctcccaggcaattggaatattatttgttcgtaattctttaagatatgctgccaaaaagcgactagcaacagttgattgttttccgctgactgctgttatcgtcacacgaaaaacgagcgcaccgtctggggtaacgactggtccgacaataactggttttaattgtagtgcctttatttgtggaactagttttttattaacttgcgtaacaatttcttctaccttactaagaggggtcttcgaagtaatccgaatatcaacgttgctaaccatattatttcgtgaaaggttttgaacaatagtaatgttacggttaggaataaaattaagtgttccgtcagaactagtaacttgtgtagtacgaataccaagagcagttactgttcctttgatttgcccaatttggacagtgtcgccaacgtctaattgttgctcaaggaggatgaaaaatccagtcacgatatcactaacaaggctttgcgcaccaagccccaatgctaaactaaagattccggctccggcaatcagtgtccctactggaacgccaatttctgatagtatggcgtataataagaaaaaataacaagtataacgataaatatttaagacaagggcttttaccgttgccatccgattgctattttttagtacattgtatttttttgattcttgaaaaagatggacaatgataactcgtcctacccataaaagtattaaaaataagacaaacgtaacgataattaaaagaaatttacttaaaagctgttgtgaaatttcgtgccaggataaatctgtaaaagctttttttaattgttccgtttgttttgatgtaagtgaagtggcaccagtgatcataataacctcctaaaaaatactaataaatattttaacagggaagacaagcttctgtcgactacactagattatcgtttttatttgttttatgatattcttagcattgaataaatattttgaaaactaaaggagggattatcagatgacttttggccagttggcagggttaattgcggcaatcgcattcttaatcttagtcatttttgcatgtatcctgttgaatcaattgagtaagacaatgaaagaaacaaataaaagtattacaactttaacgcgggatgttcattatcttagccaagaaatggaggacgtgctaagtaacacgaatacattgttagacgatattaaccataaatcagaacaactagatccggcggttaaagcggttgcagatgtaagtcagagtgtttcggaagtgaatgcctcacttcaagaaatggtcgagaaagcccggttgcaccgcgagaagcgacaatttgaccggagtatttttaaatttgcaggaaagacacttgttttcgatgctttcaacaaatttagacagcatcggaagcaaaagaaaggaatgacaaataatgagtaaaaaattacttgctgggatattattaggtggagtcgcaacatatgctgcatggaagaaaatggcgccggctaaaaaagaggcattgaaagaaagcgttgatgaaaagattaataaggttgctgattatgtgactgactataccttagacgcattagacattgtcgatgaccttatgagtgattctaacttgaatgataaggtgagcggcgctgcgggtgctgttaataatgttaagggtaagataaaagatagcgccaataaagtagttaatcatatgactaatgatgactttgataagcaaactgctgatattcgtgaggaattagcgaagaataaagaaacagatgaagataataacgatattattatcgatgctactagtgatcaaaagccagcatctactgaagacgatgaaacagatcaagatgacgctaatgcagccgataaataagtaaataaaaaagctgagaggtttctcagcttttttattttaatgagggaaagttagtaattctttagttgtatgcgtaaatggttcgcaaccatcttctgtaatatgaacacagtcttcaatccggacgccggcaaaacctggaatataaatgccaggttcaatggagaagcacattccaggttcaaaaactagctgatttccttccatgattgatggaaattcgtgttcactgctacccattccgtgcccgaggcggtgaataaagtattcgccataaccagctacagtaatgatatcacgagcgatcttatctaattcttcagcggtcattcccggcttcgcagcattttgagcggccaattgagcctctaaacataccttgtagatgtctttttgtttgtcatttaactttccgacagccactgttcgggaagcatcgctaatatagccatcaacaattgttcctaagtcaaagaggacgagctgattattttggatcttattactggaggtagctccatgaggttcggcagcatgaggacctgcttgaactagcgtatcaaaactcattttattaatcccatgttgtttaagagcgtattctaaatcggcagcaacttcttgttctgttttaccaatttgaattgcttcgaatcctactttaaaagcgaaatcagcccatttccctgcttcatttaacttagtaatctcatcatcgcttttaatcattcgcatttttgctattaaaggagagagatcagtattaaaatgggcattggggaggacttcttctaaggcacgaagacggtcaacagttagtgattctccctcaattccccagttaattggtgaaccagcatgatttttgatatgttcagcaataagctcaaaaggtttttcgtgatctaaatacccatataccggatatttccaaccagtatcctttattgcttctacttcaagcgctggtgcaaacagaaatggctcactgtcggcaaaaaggactagtgctaatacccgttctactggatcgctgtagaaactagttaggtaattaatggtcattggatcactaatataagcagcatctaatcccttttcagtaagagcgctttgtaattgattaagttttgtcactgcattcacttcctaaaaaagattgcgaatattataacatattgttatgacccgaaagtaaaaaaataatgaagaacgtttgctaattaaaactaaatctgctatattaactaggttatgaaaaaatatgaaaacagattataccaataaagaaagggctatcttatggaaaaacaatcagtaacaatttatacggttgcccgagaagctcgtgtctcaatggccactgtttcacgagtagtaaatggcaatccaaatgtaaaaccagaaactagacaaaaagttttagatgtaattaagcagcttaattatcgtcctaatgcagttgcacggggattagcttctaaaaagacaacgactgttggggtagttattcctaatataactgatccatactttgcggaattagcattggggattgatgatgttgcttcaatgtataagtacaatatcattttaactaattctgattctgatgatgaaaagatcctgaaagtggtgcggagcttgcttgctaaacaggttgatggacttatctttatgggtcatgatgtttctgatgatctgcgaaatgaatttgaaagcacaaatacaccagttgtagtagctggttctgttgttaatgatgatgctttaccaagcgttcggattaactaccaagcagccgccaaggaagcgacagaatttctgctaaaacatggtgatcaacaagttgcctatattactggtccattacgatactcaattaatggcgaagaccggctcaatggatataaagaagcattggcaaataataatgtgccatttaatgaattattagtaattgaaacggacgggtcttatcaggctggatatgcaaaggcacaagaagttatcgaaaagggattaaaggctgcttatgtaacagatgatagtttagctgctggtctcttaaacgggcttacggatgctgatattagcgttccagatgattttgaactaatttcttctaatgacaccaattatacaaaggttgtccggccaacaatcacttcgatcactcaacctctttatgatcttggtgccatttcaatgcggttgttgacaaaattaatggatggcgatgacagcaatgatgatgaaaaaaatgttattttagatcatggctttgttgaacgccaatcaactcgtaagtaggttgtgatttgttgtgacaacccgaagtgaattacgagcacaacgacaagaaaaagttgagaagccaatagaagaaacaccgaaaaagcatcattttctatactgcttatggggtgtaatctgtgtgactttactcgggctaacattactaattaattcgacacttttaaatgttaactttgtaaaagaagaagttacaaattcgtcgcttgaatcagttatgttaaaccaggttaacagtagtctaattcagtacgggatttcaacttctatcttaaagaaaagcgatactgataagctaattaaccaggcaattgatcaggtatatgcaggtgaaaaaattaatcttgacctatcacctatagttaataatgtgggcgcatctgttaattcccaattagctcaatatggtttgtctacttccatgttaccagcaggcagttcttcagcaattgctggtaacattaattcgatggttaacagtcagttaaatgctcccgaagttgcacagttaattaatgggattaaaattgctaaaacggttgttaatattattttagtgatttcaattatcagcctcgttatattgattcttaaggggttatggcagcatcacttaattggtagttttaggtggatttgtctgtggggaactattttatacacaggaatcgttatgactattcatgcgattgcccttcaaatgggtgcaggccaaccagacataagtccctttatttcccaggttgctaatgattttcagcagactggatttcacggttcaatgatgatgattgtcattagtattgtgttatttattctgcactttgtaaaacgaaaatggcaacctcgccaataaccttgaattaacgatgaatatttgctaaaatttatctgtttgtattacactaataaagaaaagaggagtcagtaatgtcaggacattcaaaatggcataacattcagggacgtaagaacgcccaagatgctaagcgtggtaagattttccaaaagatttcacgtgacttataccaagcagctaaagcaggtgatcctgatccagcgaacaacgctcaattacggcttgtaatcgataaggcacacgcggccaacatgcctaagaaaaatattgaccgtgctattgctaaagcttcaggtattggtggagctaagttcgaagaagttacttatgaaggttatggaccaggtggggtagcagtaatggtttctgctcttactgataacaagaaccggactgcatctgctgttcgttcagcatttagtcactctggcggttcattaggtgctagtggatcagtttcatacatgttcgaccgtaagggattaatcgaaattctccgtgatggtcttgataagagcgaagatgatatgttaatggatgctttagatgctggagctgaagatatgaaggcaactgaagaaaagttccaaatcttcacagatccaagtagcatgacagatgttcgtgatgctcttcaagaacaaggctacgaattagatactgctgaagttaccatgatccctcaaaaccggacagaggtacctgcagataaggcaaagcaataccgtcatttgattgatgaattaacagaaaacgatgatgttgctgatatttacgaaactggtattttaccagacgaagatgacgatgaagaataattcaatcattgttattaagaggttaaaaagcaaaacgctttttaacctcttttttagttttaaattttttagtgcatttttagaatttatccgtatttaaataatagggaggttaaaatatgccgagttttgaagaagaattagcaagaatgattcgcaagcaaccgagtgacctatatatcttacctcatgataggtattatcaattatccttagcgataagggggaccctattaccttttaaacaggttacgcgtgactatggtcaacgttttatctcatacttaaaatattgcgccaatatggcagttagtgagcatcgacgaccccagctaggcgcttttaaatttacttatgctcaccaaaagatcaatttacgcttatcaagtgttggtgattatcaagggagggaatcactagttattcgctttatatatcctcttaatgatattaggtttaattttttagttcctcatcagtgggaaagattacagaaataccgtcaacaacgaggtttaattctttttgccgggccaatgggggctggtaaaacaactaccatgtatcagcttgctcgacagctattgccgaaacaaattgtattaacaattgaagaccccgtagaaattgatcatccgggatttattcaattgcaagtaaatgaattagcggggatgaactatgaaagtttattaaaattgggattacggcatcgcccagatgtatttatcattggagaaattcgtgattcacagacagcagctatgtctgtccaggccgcattaagtggtcacttagttttgggaactatccatgctcgaaatgcttatggcgttgtttctcgccttcaacaattagggatagattcttattaccttcagcaagtattaacggcagtatcttatcagcgtttaattccgttggtgaatggagaacaagccatcttatgtgacctgttaaatcgacatcaatttagtggtttgcttagtggcaccaagaaaggaggaatatctgatgaatggtcaaaagctcttcagcaggctgtggaaaatggcgaaattacggagaatactgcacgtcaataccaacaaggttaaattcaatcatcagcaacaagcagattttttccttttattagcagatttattaagtgttggcttttctgtcaaagaagcacttggttttatcaaggctgtcaatccgaagctaggtccttggattgcttctatagataaacgaatgcaaaagggagcgagttttgcccagagcctgcagtcagaagtaaaagacgatttgttttatcaattactattagcagaaaagcatggtaatttaacaaaaacattgagtgaagtaggaaagatacttacagcacgagaacagcaacgaaaaaaattatttagtctcctgcaatatccgctaattcttttagggatgctaggggtggtgatttgtgggttaattttgtttgtttttccagaattgaaagtctggcaaggcgagaggcaaactttgccgctaattcacatgattacgttaggagcaacgtatctttttaccgttatctttattagcgctgtatttcaggggctaagatggcatcaaatgaataaggaacaacggctaattaagatctgtacaataccgatgatcggaaaatgctattgttattattttcaatattatttaactagtatattaggatcaatgttgcaacaaggattatcgttggctgaaatttgtgaaattacccagagctttgatagaaaatcaattctttatatttttggtaacaaaataatgactactattcaacatgatggagatatttcaaaagtggtggctacctactcttttcttcctaatgaattaattgtttttatgaataagggggcgaccagggaaaatatgggacgggacttaattgttttcgcgaatttaaaatttaaggcccttacaactgcaattgaacatttattgatttttgttcaaccagttatctttagcattattgcaatcataattgttattttatatcttagtatcttattgccaatctgtcattcattccaaggagtttattaatgaaaattttaaagaaaaaacaatcaggcttcaccttgctcgaaatgtcaatcgtcttatttattattagcctactagtattgattatgctgcccaatctctctcaacagcgaaagcatgctaatagtattcatggaaaagcgatgacatctgtaattcagacccaaattgatgcatatgaaaatgaaaatggaactgataatgtcagtttagaggaattgaataaagcaaattatctgactgatgcgcaggttcaacaggcccatcacgaaaaaattgtaattgttgatgggaaggcaattcagcgatgaattttcgtgaagaagggtttacgtttctcgaagcaattattgttttaggaataacggccctccttttactaattacgattccaaattttacaaaaacgcgtcaaaaactagctgaagaacaattttggcaatcattgcgtcaagattggcagtgggcgcaattaaagtgtgagagtaaacatcaatttgttgtaattcgccacgacaaaaataacgaaatgattacttttcgtataaatgatcaaacgagagagacaaaagaaatccttattccctcaacactgaatgttgagtggtttggtgaactttatcttacgccaaatggctatacgcgcccctgtacccagcgttttaaatcattaatcgatggtcactattactacatgaagattcaattaggatggggaggataccgaattgagaaacgctaaagtaaaagcatttatgatggcagatagtttaattagtttatttattgtagcgatggggataaatttattttttatttgcgaaaaacaattgtggttacaaaatagaaatcttcagctaaaaatggccgcaacgaggttaggaaaagaggctagtgatttatatgcggttaaaaagcaatcagttattttaagccgtggtgatttaaccgcaaaagcaacggtccaaagggtggttgtttataataataatcgatgcctttgtcgggttgaaagatgaagaagggggcctttactttaatagaagcgacttacgcgttaattatttcttcattagtgattatcaatataagtttagttactactagcatgagacaagtaggtaaaatgaacttagaatcaacgatcacttggcatttgtttttacgggaattagaatcagtcaatcatcgttttgaattaatggaggttcgtgataattggttattactgtacagtcagacaactgatcaaaagtatgaattaagagaaaaccatgctctatacctaacgtgtcagaataaaggtggttatatgccattgttagatagcattaagaatcatgaatactcgtttacgcaacttgattcccaacgcgtattgattaaggtgacaaggaaggatggagagaaagcaagtgcaattgttaagttttatccaccaaaataaaaaagagggttctattttatttgtaagtattgccgtcctacttataattagttcaattttattgtttcaatatcgatattatcaaaattatcaggaaatgggacgagatctttgttcaatttatattgataaaataaaagataatctaagaggtcaatgagagtgttatcttgaatttgctaggaataatagttaaactaataaggtaatgattgtattatttggaggcgactagcactgacacagaaaacaccacagcaattatttgagctttttgataaggccactgaaattttacaagcagcgttaaattgttcgtatttagatgcgctattagaaaacgcagaaaatattattgacaataatactgttcgtgttgatgaaggtgttcctgatgaaaaaactgtaaatgaattgcagaaaatataccaagaattaaatttacaaaatgtgaagccagaaattatccgacaaattatccagctgagttttttgaaagtaattcgaaaagatgcaattcaggctaatcatcaaatgactcctgatacaattggcttaatcatggctttcttaattgaaaaggttacaaaaatcaaggagattaagactgtttttgatccagccgttgggacagctaatttattaacgactgtgatgaatcagcttaaagtaaatggagataaagacatcgttggttacggaatagataatgacgaagatatgttgggagttgcgagtgtaaatacagaattacaacaccttaatgtaaagttgtaccatcaagatgctgtaactgctttagatatttctcaatgtgatttagctatttctgatttgccaattggttactatccgcttgatgaaaacgccaaaaactatcaaacacgggctaaagagggtcattcatatgttcaccatttgttgattgaacaatctatgaattatcttaagcccggtgcatttggggtattcttagtgcctagtagcttattccaaactaaagaatcacaatcatttgttaaatggattcagtctgttgcctatttacaaggacttatcaatttgccagcagaactttttgctaatccgaatgcgcaaaaatcaattttgttattgcagcgccaaggtggagatagcaaacaagcagttaaagttttgttgggtgagtttccttcatttaaggataaagcaaaatttgcttcattcatggatgatatcagtaaatgggtaacaacgaatttacgttaaaggagaaaagtcaatgtcaaaaacaattgcagttaacgctggtagttcaacacttaaattcaaattatttgatatgccaagtgaagaggtagtagctgaaggtacgattgaacgtattggtgaaaagatgggccatgctaagattaagtatggtaatggtcaaaagcatgaagaagataagccatttgttgatcatgctgccgcagttaattatttgttagataagttaattgaattaaagattgtggcaagctatgatgaaatcacagcagtaggtcaccgaattgttgccggtggagaattctttaaggattcaacaattattgatgatgatgttattagcaagattgatgaattgtcagaatatgctccactccatgagccggcagaattggttggtattaaagctttccgtaaagtattacctaatgcatttgcggttgctgtttttgatacatcattccatgttgatatgccagaaatgaatgcattgtacagtgtgccttatgattggtatgagaagtatggtgcgcgtaagtatggtgctcacggtaccagtcaccgttacgtatctgcacgtgctgcggaaatgttaggcaagccagttgaagaacttaaattaatcaccatgcatattggagcaggtgcatcaatcactgccgtaaagaatggtaagtcattcgatacgtcaatgggctttacgcctgttgctggaataacaatggcaactcggtcaggggatgttgatccatccttaattgcttttatgcagggtaaactaaacttatcctcagatgagatgattgatattttgaaccataagtctggtttgcttggtatttctggtatctccccagatatgcgtgatattcttgcagctgctgaaaagggtgacgaccgagcacaacttgcattagatatttatgttaaccgcattgtccgttacattggagcatatattgctgaaatgggtggcgcagatgccattgtcttcactgccggtgttggtgaaaacagtgttccagtacgaaagatgatcacagataagcttgactactttggcattaagattgatcaagaaaagaacgactgccatggtgttgaacgtgatctttctgctgatgatgcaaagattaagacattattaattccaactaacgaagaattaatgattgttcgtgatattgaacgtttaaagaaaaataactaagtactaaataattcgccaaaagctgactagttgacaagaaatgtttgtctctagtctctttttattttagaatttaagataactatattgcctttttaagaaagaagattctctatgaagttttgcacgtcagatactcatttttttcatgatagtctccttggtacaaataaatttgcaccaaggccattcaataatgtcaatgagatgaaccaaacgattattaataattggaacgataaggttggtgaaaatgatattgtttatcatttaggagacattgctctgtactttactaaacctcaacgaaatgcctatcaagcaatccttgaggtgttattacaattacatggacacttaatactgataaaaggcaatcatgataatcgggccctttttaaatatctagaaagtaataattatgagtttaatggacttcctaaatttcagtttcatgatgtgggagtactattaaaatataatcaccgtcagtattatttaactcattatcctcttatgttaggaatagcaccgcaaattattaaccttcatggccatattcaccactattctgttcccattaaagaaaatataaatgtaggcgtggatgctcccgaattagactatcttgaaaataagcctaaatttggagctccgctgaattttcatgaaatagaagaaatcgtagcgcaaaaagctatgaagtatccaggacaaaaataatcaaaagaaggtggaaaagatgaatagagctaagattcaagattatattgatcagcgtgaagagcaacgatctttaatctatcatattgaaaaaaaagaccagacacattttaccgttaatggacatccttacgaattagtaaaggactaccgtgacggttttaattcagaaaaattcgcagaacgatttagcagtgttctgagtaaatatgactatatcgttggggattggggatatgaccaattacgcttaaaaggtttttataatgatgataatcccttatttgaaccagaattgggtgctgatacgattgaggattatttatttgagtattgtaattttggctgtgcgtattttatccttcacaatgatgatgtttgtattccacggcacagttaccgtcagcgtcgaaagaaaactacgccagtcattcatgaacggcgacggcaggttaaacaaccgaacgtgcgtcaacggcataatcagcgtgcagaacgtgtaaaaaacggtcatcggcaaaaatttgtgattcatcaacgaaaaaagaggagctaaggcaaacgatgaaagattatcaaggatattttattgatttagatgggacgacttataagggcaaaaagcaaattccagcagccggaagatttatcaaacgactacaagatgtcaagaaagaggtcttgtttgtaacaaataatagtaccagaacgccagattttgtcgctgaaaacctccgtgaaaatcataatattaatgttacggcggaaaatatatacacaacagcaatcgcaactgctgactatttacggtcaatggcgccgataaaaagtaaaatttatgttattggtgagtcaggattaaagttggctttagaaaagcgagggtttatcttgactgatgatcaacctgaatatgttgttgtaggattagatacgaatgttacttatgagaagcttgaaaaggcagtcttgttaattcgaaatggcgctaaatttattgggaccaatgctgatagtaatttgcctaatgaacgagggatggttcctggagcaggttcgattgtaaagctagtagaatatgcaactcaagtgaaacctgtgatgattggtaaaccagaagcaataattatgaaaatggcacttgaaagagttaaattgcctaaagaaagggtaattatggtcggcgataactatcatactgatattgaagcagcaattaatgttggaatggatagtttattagtttatactggtttatcgcgtccagaagaagttataaaagaaaaaatccagccaacatataaggtgaataatcttgatgaatgggaaatttgaatttattcagtggggaagagcaatcttattgacactacttagtttagttgttgcaattagtattgctctttttatcgttattaatatctcacctttttttataacaattcctaagcacctcctaggattatctgcctctgaattaatagctgattatggaagtgtcattaaatatatccagcttccggcccagcgagtcctcgaactaagatatttaccaattgccccttctgcagttcaccattttgaagacgtaaaacatttgattttattgaatgaagctgtgatggtggtttcgctcccgttgttagtgtttggattgaaaaaacaaaaacggcaaaatcagctctggcgcctgattttaccgtttcagatgttatttattttattgctctttagtgggtttatggggataacaaatttcgatgtcctttttattaaatttcattatcttttctttagcaatatggattggctatttgatccacgaacaacgccaatcatattgttgatgcctgaaaatttttttacagtactatttggattatggttaggatttatattgataatcttacttttgatctggggatggataaagcttatgttaagcatcttctttaacaaaacgcgaacgtaatgctccgacaacggctgggattaacgtaaccacaataattgcaagaatgatgacagagaagtgttcttgaacaaacggaagattaccgaagaagtaaccacatccacaacaaagtgctacccagataacacagccaattacactataacgaataaattgcttgtaggggaaaccagaacctgctgccgcaaatggagcaaatgttctgatgatcggaataaaacgggcgagaataatagccggcgcaccatgcttttcaaagaagacttcggcacgttctagactatctttatcaattaatttaccaaaaagtgagtggttagaaaggctcttcccaatcttatgaccaattaaaaagttaagggagtctccacccaaacaggcgcataagaaaataaaaataaaaatccaaatattaagatgataacgtgggtcagcagctagtgcacttgcagcaaagagaagggaatctccaggtagaaatggcattatgactgcaccagtttcaataaatataatagcgaataaaattaaataagttgcatcgccgaattgattaacaatctgaattagatgaacatcaatgtgtaatataaaatcaataagagttgccaaagtaattctcctttgtgtaataagataatactgttaaagtgtagcaagatagaaaaatgttgtgaaggggcgtttaaaacttttaataatttttgaaaaatatatttattgtaagtataaattagttgtgtgagactagttcattcatagtcaatgacgaaaggatcattgcaccctttttgaaaaggctgaataacgtttattatcataagaatggtaaagcaaacgaaaaaaataaataaaaatcaaaaaaagtgttgacgagggagtgaaatccatgtatagtagttatcgttgtcaaagcagttaagtgctgttgagatggttaacaaaaagttaaaaataattgttgacatctacttgatgacatgatatattaataaagttgctgattgagttatcaatcaaaagaaattcaaaattaattaaaatttcttcttgacaagctaatctaatatatgttataataaccatgttgattggctgcttgattggccaacaggtagacctttgaaaactgaacaaagtttcgacgaatcaaatgtgtagggtcttcaatcacgatgtgatttgaagcaaaacatttgcgaagtcaattcgcttaacaataaagataattgagagctattcaagttcttatatattttatatgagagtttgatcctggctcaggatgaacgccggcggtgtgcctaatacatgcaagtcgtacgcactggcccaactgattgatggtgcttgcacctgattgatgatggatcaccagtgagtggcgaacgggtgagtaacacgtaggtaacctgccccggagcgggggataacatttggaaacagatgctaataccgcataacaacaaaagccacatggcttttgtttgaaagatggctttggctatcactctgggatggacctgcggtgcattagctagttggtaaggcaacggcttaccaaggcgatgatgcatagccgagttgagagactgatcggccacaatggaactgagacacggtccatactcctacgggaggcagcagtagggaatcttccacaatgggcgcaagcctgatggagcaacaccgcgtgagtgaagaagggtttcggctcgtaaagctctgttgttggagaagaacgtgcgtgagagtaactgttcacgcagtgacggtatccaaccagaaagtcacggctaactacgtgccagcagccgcggtaatacgtaggtggcaagcgttatccggatttattgggcgtaaagcgagcgcaggcggttacttaggtctgatgtgaaagccttcggcttaaccgaagaagtgcatcggaaaccgggcgacttgagtgcagaagaggacagtggaactccatgtgtagcggtggaatgcgtagatatatggaagaacaccagtggcgaaggcggctgtctggtctgcaactgacgctgaggctcgaaagcatgggtagcgaacaggattagataccctggtagtccatgccgtaaacgatgagtgctaggtgttggagggtttccgcccttcagtgccggagctaacgcattaagcactccgcctggggagtacgaccgcaaggttgaaactcaaaggaattgacgggggcccgcacaagcggtggagcatgtggtttaattcgaagctacgcgaagaaccttaccaggtcttgacatcttgcgctaaccttagagataaggcgttcccttcggggacgtaatgacaggtggtgcatggtcgtcgtcagctcgtgtcgtgagatgttgggttaagtcccgcaacgagcgcaacccttgttactagttgccagcattaagttgggcactctagtgagactgccggtgacaaaccggaggaaggtggggacgacgtcagatcatcatgccccttatgacctgggctacacacgtgctacaatggacggtacaacgagtcgcaagctcgcgagagtaagctaatctcttaaagccgttctcagttcggactgtaggctgcaactcgcctacacgaagtcggaatcgctagtaatcgcggatcagcatgccgcggtgaatacgttcccgggccttgtacacaccgcccgtcacaccatgggagtttgtaacgcccaaagtcggtggcctaacctttatggagggagccgcctaaggcgggacagatgactggggtgaagtcgtaacaaggtagccgtaggagaacctgcggctggatcacctcctttctaaggaataaaacggaacctacacatcggagaaactttgtttagttttgagaggtttacctcttaaaactttaacctataagacgcttatttgggcctatagctcagctggtttagagcgcacgcctgataagcgtgaggtcgatggttcaagtccatttaggcccatatggggaattagctcagctgggagagcacctgctttgcaagcaggaggtcatcggttcgattccgttattctccattatcaaccataaggttgatagagtttgtactttgaaaactaaatactatctaatttctttattaacaaaacaataaaccgagaacaccgcgttatttgagttttaattaacgaattataatcgctaactcaattaatcagacaatctttgattgtttaggttaagttatgaagggcgcatggtgaatgccttggtactaggagccgatgaaggacgggactaacaccgatatgcttcggggagcggtaagtacgctttgatccggagatttccgaatggggcaacccaatcagcttagtcgctgattacttgactagtgaatacatagctagcaagaggtagacgcagtgaactgaaacatcttagtagctgcaggaagagaaagaaacatcgattccctgagtagcggcgagcgaaaagggaagagcccaaaccaacaagcttgcttgttggggttgtaggactgaacattagagttaccaaagtgcgacgtagtcgcaacagttgggaagctgtgccatagagggtgaaagccccgtagacgaaacgtcacactctctgttcaggatcctgagtacggcgggacacgtgaaaccccgtcggaacccgcgaggaccatctcgcaaggctaaatactccctagtgaccgatagtgaaccagtaccgtgagggaaaggtgaaaagcaccccggaaggggagtgaaatagttcctgaaaccatgtgcctacaagctgtcggagcccgttaatgggtgacggcgtgcctcttgcagaatgaaccggcgagttacgattgcatgcaaggttaaggtggaaaaaccggagccgtagcgaaagcgagtcttaaatgggcgtaaaaagtatgtagttgtagacccgaaaccaggtgacctacccatgtccaggttgaaggtgcggtaaagcgcactggaggaccgaacccgtgtcagttgaaaatggctgggatgaggtgtgggtagcggtgaaattccaaacgaacttggagatagctggttctctccgaaatctctttagggggagccttgaggtaaagaatcgtggaggtagagctactgtttggacaaggggcccgtcatgggttaccaacttcagataaactccgaatgccattgatttatactcaggagtcagacgatgagtgataagatccaccgtcgaaaggggaacagcccagatcaccagttaaggtccctaaatatatgctaagtggaaaaggatgtggagttgcatagacaactaggatgttggcttagaagcagccaccatttaaagagtgcgtaatagctcactagtcgagtgatcctgcgccgaaaatgtaccggggctaagcatattaccgaaactgtggatgtgcactatgtgcacgtgataggagagcgttctaagggcggcgaagtcagaccgtgaggactggtggagcgcttagaagtgagaatgccggtatgagtagcgaaagacaggtgagaatcctgtccaccgaatgactaaggtttcctggggaaggctcgtcctcccagggtaagtcgggacctaagccgaggccgagaggcgtaggcgatggataacaggttgagattcctgtaccagttaactgcgtttgacgatggagggacgcaggaggctaagcaaaccgtacgactggaagagtacggccaagcagtaagtcaggatgtgagtcaaatgtttacatccgcgttgacaagctgtgatggggagcgaaattaaagtagcgaagttgccgatgtcacactgccgagaaaagcttctaaggagtagttaactgcccgtaccgcaaaccgacacaggtagtcgaggagagaatcctaaggtgagcgagagaactctcgttaaggaactcggcaaaatgaccccgtaacttcgggagaaggggtgctggccgcaaggccagccgcagtgaataggcccaggcgactgtttatcaaaaacacaggtttctgcaaaatcgtaagatgaagtataggggctgacgcctgcccggtgctggaaggttaaaaggatgggttagcttcggcgaagctcagaattgaagccccagtaaacggcggccgtaactataacggtcctaaggtagcgaaattccttgtcgggtaagttccgacccgcacgaaaggcgtaacgatctgggcgctgtctcaacgagagactcggtgaaattgaaatccctgtgaagatgcagggtacccgcgacaggacggaaagaccccatggagctttactgtagcttgatattgagtgtttgtactgcttgtacaggataggtaggagccgtagaagtcgggacgctagtttcgacagaggcgctggtgggatactacccttgcaatatgaccactctaacccgcagcactgaacgtgctgggagacagtgtcaggtgggcagtttgactggggcggtcgcctcctaaaaggtaacggaggcgcccaaaggttcgctcagtatggttggaaatcatgcgcagagtgtaaaggcacaagcgagcttgactgcgagacagacaggtcgagcagggacgaaagtcgggcttagtgatccggtggttccgtatggaagggccatcgctcaacggataaaagctaccctggggataacaggcttatctcccccaagagtccacatcgacggggaggtttggcacctcgatgtcggctcatcgcatcctggggctgtagtcggtcccaagggttgggctgttcgcccattaaagcggtacgcgagctgggttcagaacgtcgtgagacagttcggtccctatccgtcgcgggcgtaggaaatttgagaggacctgtccttagtacgagaggaccgggatggacataccgctggtgtaccagttgttccgccaggagcaccgctgggtagctatgtatggacgagataaacgctgaaagcatctaagtgtgaaactcgcctcgagatgagatttcccatttccttcgggaaagtaagacccctcagagatgatgaggtagataggatggaagtggaagtgccgtgaggcatgaagcggaccattactaatcggtcgaggacttaaccaaggagcggtaaggtttattggaagagaatagataggatttagttttgagagcacaagctctcgtccgaagggacaaagagtgtggtgatgatggcttgaaggatacacctgtacccatgccgaacacagaagttaagcttcaacacgccgaaagtagttgggggatcgctccctgcgaggataggacgttgccacgcttatggaggattagctcagttgggagagcatctgccttacaagcaggaggtcacaggttcgagccctgtatcctccattgagcgattaagctcatgagccgttagctcagttggtagagcatctgacttttaatcagagggtcgacggttcaagcccgtcacggctcattatcagaaattttatctgataataaaaaaacaaagtgtcaattgccgacttagctcagttggcagagcacctgtcttgtaaacagggggtcggaggttcgaatcctctagtcggcactttcatatgcggaagtagttcagtggtagaacatcaccttgccatggtgggggtcgcgggttcgaatcccgtcttccgctttgccagttctataatgccggggtggcggaattggcagacgcacaggacttaaaatcctgcggttagtgataaccgtaccggttcgatcccggtcctcggcacttattatgcacccatagcgcaattggatagagtgtctgactacgaatcagaaggttgaaggttcgactccttctgggtgcattttttcgggaaatagctcagcttggtagagcacctggtttgggaccagggggtcgcaggttcgaatcctgttttcccgatttataaaattaatatattattagttttttcgcggtgtagctcagctggctagagcgtccggttcatacccgggaggtcgagggttcgatcccccccgccgcgattggctggctgttttggacctttagctcagttggttagagcaagcggctcataaccgcccggtcgtaggttcgagtcctacaaggtccatcagagattagctttgatgaatcattattgtttaatcttattagttcattatggaggattacccaagtggctgaagggggcggtcttgaaaaccgctaggccgtgagagcgacgcgagggttcgaatccctcatcctccttatattatcgcggggtagagcagtctggtagctcgtcgggctcataacccggaggtcgttggttcaaacccagcccccgcaattttggtccgttggtctagttggtttaggacgcatccctgtcacggatgagatcacgagttcgagtctcgtacggaccgtttatatttggctcggtagctcagttggtagagcaacggattgaagctccgtgtgtcggcggttcgattccgtcccgcgccattaacttaatattatgcgggtatagtttagtggtaaaaccacagccttccaagctgttgtcgcgagttcgattctcgttacccgcttagatatgggcctatagctcagctggtttagagcgcacgcctgataagcgtgaggtcgatggttcaagtccatttaggcccattggagaagtactcaagtggctgaagaggcgcccctgctaagggtgtagatcgcgcaagcggtgcgagggttcgaatccctccttctccgtaatgacccgttagtcaagtggttaagacaccagcctttcacgctggtatcgtgggttcaaatcccgcacgggtcatctttattatcgcggggtagagcagtctggtagctcgtcgggctcataacccggaggtcgttggttcaaacccagcccccgcaattttggtccgttggtctagttggtttaggacgcatccctgtcacggatgagatcacgagttcgagtctcgtacggaccgtataattaatgataaataaaaactttctacggataggtgggaagtttttttgttagtaaaaggtaaacagttaataaaatacgaattaaaaaggctctacaatatcgtaagcagtcaataacagtacgtctagctctagctaccccggatcttctatactgagactatcatcagtaaggagattttttatttatgacagaacaaaatgaaattattaccccagttttcaaaaacaagccaagtaatttacaaaagcattcttttacggcacgccctgccgtaaaaattaatgtgaatgaagtcgaattaacgattttcaaggggactaattctgttttagcttcggatatcgttaaagtggttattcgttatgctcgttaattggcatgacccagattatatctatttagtctgtggaaaaacagacatgcgaaaaggtattgatgggctcgcaatggtaatcgctgagaactatggattagaattatataataattcgcttttcttattttgcggcggacgtaataatcgctttaaaggattgttttgggatggcgagggctttattatgctctataaacggtttgaaaatggccaccttagttggccgagaaacagtaatgaagccaaagaattatctgatcaacagctcgactggttattgcaaggactgaacccattaccaattcgtaaaattcaagctgttcgaccgggaagtttttattgagttacctctatttaaaagaagaattctttgatataattaccaaagaataattcaaaggaggtgacgtaccatgaagcaaacagcggaagaacaaatcaaagaacttaaacaacaattagctatggtcaatgaaaagattgctcaattaatagctattatcaaacttcaaaagaaccaaatatttgggaaaaagactgaagtaatggagcccgtcgttgatggacaacaatccttatttagtgagcaagaaatggatcaacttcaagatcctgatatttcagtcacggaagtgactgaaaagaaaataaagcaagtggtgcgtcaccggaaagcaaagcaatctggtcagcggaccacttttttagatggtttaccacagattgaagaagttattccattcgccgtttgtaaaattaagttagaaaaatagaaaagccatttgtggtagacttttgaatacccctaaacaaaagaaaggaaaccacaaatgacttacacccatcttaccacaaacgagctgacaatcatcgcccattctttcgtgcaaaagcttagagcgtaccgagtggcccaaatgatcaaccgtagcgccgaaaccgtttatcgcgtttatcgttacctggaaaccggtgcctcaattgctgattatcaagatcactatatgcgcaataagcaacgttgtggccgaaaacgtactcagttgtcactggctgaactcacttatatcaacgacaaaattgcccaggggtggacgcctgataccattattgggcgcgctgagcgcccaattagttgtagcctgcgaactctttaccggatgtttgaacgtggccagttcggcttcgatgtccgttccttgccgatgcgaggtaagcggcacccgaatggctatgtcgagcgccgcgggaaggctggccaattggggcgaagtattcacgagcgtgccaaggactttccgcactatgccactgaatttgggcaccttgaagctgataccgtccaaggtaaaaagcaccaaggggcggtaatgaccctgaccgaacgcaatcgaaggtcgaaattgtactcaatgtgcacgaaaagacggctgatgcgattaaccaacacttaggtcagtggcttcgtaaatttccgtggcacttcttcaaatcgattacctttgacaacggaaaagaattcgccggctggcgcgagattgccaatcaatttgaccttcacacttactttgccgaggttggtgctcccaatcaacgagggctgaacgaaaacaacaacggtcttttacgccgggacggcttaacaaaacggctaaatttccgcaatcttcccgatgaattggtgacccaactgatgagtaagcgaaataacctgccccgcaaatcactaggctatcgaactccatatgaggtattcatgtcctacgtcactgatgagcaactactttctttctaacttaaattgacatttcgggataaaaaatttggcatggaatctctatccataccagaaagtgtataccctaaaaaacaggactatgaattaccaaaaatgataattcatagtcctgttgtaggtatcagttaaataccattggcaaataccctacgttatctacttattaaaaaatgggtttgtaaatctcatcataataactattatctgaccccatactagtaaagttctttaaggatgtgaaagtatcgctttccttccatgcagttaaggcttcaaaatcggcccaagcagttagtaaaactaaagtagtagcttccgctttattatcaacgctaagcatataaccaccgttcatattagctggttcagttaataccttttgaagtgtattataaagtagcttttgacggtcaccgtttacttgaaatgattggtagtaaaacattccatttaattgagcatctagcgttgaatcaagagttgttaattttactggtgactgaaaaatagtatcttttccagaaagatcaaataatgctaattttcttgtatgagtagttgcctgcattaatttaaaatgacgttcgggatatttatcaatgattgattgtaaaatttgtcgtgaaccaaatgttaagctaatttttgttaacatattaatccctcctcagaagttagtagtcatacttattatagtacaacttaatgtaaaataattaaattgtaaattttatctactttatttttgataagacataaatggaaaatctaatatcaatagaacttacaaaaagtcaataatttttgttatatcgctttaatattaattgaatagggagtataataaacaatgtattaatgaatgttctagtttaacttaataaaggaggccactaaacgaaatggttacactatatacgtctccaagttgcacgtcttgtcgtaaagcacgtgcctggctaaaagaacatgatattgcttttaaggaacggaatattttttctgaaccattgtctttaaatgaaatcaagaatattttacggatgactgaagatggtactgaagacattatttcaaagcggtctaaagcttaccagaagttgagcatagatctcaatgatttgtcgatgaaggatctgtttaagttaattagtaaaaatccaggattgttacgacgtccgattattattgatgataaacggcttcaagtaggttacaacgaagacgaaatccgtcgcttcttaccacgaaaggttcgtgaactagaactagtagaggctcaagaaaaagcaaatatgatttaactgatagaatatggaaagtattatgctttcctttttttattcttttaaccgagtaactttacttttaagcgaaaatccttacaatagaagtaacatctagttttggtaaaaggaggtgctgctcaatggagatggaacgcattaatgaaaatactattcgcgttttggtagataatgatgatttatctgctcggggtatcaccattctagatttgctaggtgaccatcagcaaatagaggatttcttttatagtatcctgaaagaagtagatactgatcgccaattccaaaataacgatgcggttacttttcaggtgatgcccactaataatggcttagaattatttattagtaaaaatgattctaattttgctgggaatgaacagcatggaccgattaatgaccaggtgtccaaatatattaagcaacatttgattcaaaaaaatagtcaagatcaagatcaaaggaaaacagcgattaatgattcagaagataatgagattcagcacacgaactggcaagtaattacgtttgattcttttgaagatttaattgattttgcgaaaattgccgataatgatgatgtttcatcatatttatataagtacaatgatttgtattatttagcaattgcttattctgattctattttgaacagtaatgatgttaaagatcagcttgctcttgcttatgaatatggaaatcccacggcaacaacggttgattttttaagtgaacatggaaagaaaataatgtcagtatctgccttgcatttaattcgacactattttgaataagctgcgtttgagttcatactcaacgtagttttttttcgtgcaaaattgagtaatttccgtatataaatatatagggggattaaatgttaattgcagttcataacgatcaattagtgttggctgaaaacgcaaaaagcgatatggcatattattgtccaggatgcgggcagggagtgatcttgcggcgaggaaagcataagattactcattatgcccataagaagggaaatgactgtggctttagcgagggtgaaacattagaacatttaaaagggaaagaacagatttatcaatgggcacaaaagcatcattggaatccgcaattagaagtctattttccaacaattactcaacgaccggatattcttttagaaattaatggacaaactgtagcagttgaatttcaatgtagtcccttaagccttgaaaagttattagcacgtaatgaagggtatcgtcagttaagaattccggtttggtggatattaggatcgccttatttgcgtaacttgggaaataagaaaatcgttcagtttacgcaaatctttagaaggcagtttgttctcttgttttgggatgtgaaaagggcgcaattagttattgatcagaaatattggcgttgctcctatagccggttaaagtatgataaaaaaactattttaatggagcagattgaaatgttaaagaagaaacagtatcattttccaaataaagaaataagaaaactatcattaactgctttaaaacttactggacatgctttatctgaatgtccactagtatgccatgatctcattgcaagctggccggcaatgtctattccaatgattatctggcgaattggtgtaatattagagatagagaaattccctttattttattcttggagagataaggaatggaaaagattattaatgaaggtaaacaaaagcaattggttattccctggttgtttacctccagaaacaatccgcaatattattatcaaccaatatacaaacgaattaattgcctttaaagtaatttgtagaagggataatcatcttattttaattcatcgtccaagatggtttaatgattcacagttaaaactacagctggttaaaaggagatcatagtatgcaacacacatgtacaatgtttttagcaggaaagaatgcaacgattgacgggtcaactatagtttgtcgtgaggaagattatagtaatgcatttgatcctcaaagatttgtattagtaaaaccagaaagacagccacgtaaatatcaaagcaaaacaactgactttaaaattgatttaccagttcctaagctaaaatatacttctacgcctgatgctgacgataaagatggaatttttggtgcgggcggtatcaatggtctgaatgttgcgatgagtgcgactgaaactattactactaatgcccggatattagcaatagatccttataacaccttatcgggaattggcgaagaagattttgtaacattagtccttccttatattaagagtgctcaagatggtgttaagaaactaggaagtttattagaaaagtatggcacttatgaggctaatgcgatagcttttagtgataataatgaagtgtggtatatggaaacgattggcggtcatcattgggtagctgttaaaattcccgacaatgcctatgtgattgcccctaatcgatttaatattactaattttgattttgatagtcccaacacaatgagttcaccaaatttgaaacagtggattgatcaaaataagttgaatcctagcgaagacgaatacaatttacgacatatttgtggaagtgcaactgctactgatactatctataacaacccacgagcatggtatgttcagcagcaactagggacgataaatgctaacccgcaaagtaataaccttccattcatctgttatgcaaaagaaaagcttactgtaactacgattaagaagttaatgagttctcattatcaagggacagcttttgatccgtatcatttagaaagagataaagctccatttaggtcaattgcactaaaccgaaacttagaattacatattctacaaatacgtaataatgttcctgcaagtattgctggtgttcattggttagcatttggtcctaatacttttaatgcagtggttcccttttatgcaaatattgacgatacaccaatcccttatcgaaacactagtactgaatattcaatagacgatatgtattggctcactcatacaattgctgcgcttggggaccaaaattatcgtcaagcacagaatattgaagaaaactttgaattgcaagtaatggcaaaaacaatgaatgttcaaaataatacggataaggaaatagcagaacatcaggatgtgagtgcatttttaaccacaattaataatcggatggccgaaaccgcagtggacgaaagcaaaaaattactagggaaactagtaaagcttgctttttcaagagaacgattacaattctaggcagaaaataaaaaaagaggttggatagatggtgcaataatgaaaggccaacttttccaatctcttttttattaattattgttttgtataatttgtagctttggcggacgatattggttcacaaattcatctaaggatgcagatcgagccaattttccgcttttaaatgcgtttattaaagtattatagtcaaaatttggaatcattaggccgtaatcagaatcttcggtgttaaaaacgactgcggtagccgtttctgatacgcctagatcacttgcgattttttgatcttgacggaaagcctgcttagcaagttgactttgccgatcctcaaaaaacatttctaagtcaaggtgtgaaccatgtgcaattttattaattaattcatcgttgtaatccaagccttggttaataagcgcagattgtaattgtaagagataatgccgtccacgttttcgtccttggaagagggctgctttataatctagtattatttggttaagggtttttgatacttgttgtcttgcagcaagatcatggggattaagatgataatatttaagtgtgctatcgatcgttttcatattgaatagtggtacaaactgataactaatttttgtatttaaatcacgatcaatttttaacacgtctttttcacaccgtaaacagcgcattcctaatggattcacaaaaagatgaagttcgagcataattaacccctccgatcatttgtatactcaaaatcctaatcctgtgaacataattatttttgcaaatatctaactatttgtaaagaatttagttttaagagttagtgtaagattttcataggttggatgaataattcatctggtcgtggaaatcttttttgtagaccaatttacttatttacaaaaaaagaaaagaccagtagcctttagtgtgtcgaatactaagcaaaggcaggtctttcctcatggatattttaacagaaatcgagcagaatttggtgaaatcaggcagtttatttgaagctgaacagattattttaaaaggggtattggagttaggacaagtaatcatgcaaaactttttggaaagcttagatcgaagcttaaagtcccaagctccagcgaactatcaagtaattaataaacagccacggacgcttaattttatctttggcccggtgacttttcaacgacggtattatcaggctgggacaaagaaacgtgaattttacttagaccaacaattaaaaattaaaccacgtcgtcgtttatcgccacactacttaatgatgatggctaagattgcccaaacaactacaatgcgcaatactgccgacattttgaaccttgtatttgacagcggaattactgccgattcggtaatgcacgccgtgcatgagttaggaaatcaggtagctaaacaaactcaagcaaaagaacaccaagctactcctcgccatatgcctaaaaatttaactattgagggtgatgcctttatgattaaaggtaaaaaagaagcaggtcagctgactcttgtgcaccattatcgggtttatgagcgagtagctaatcaaatcattaatcggcatgactttctcagtgttgggcaccaaggacggcttgaagcacgactaagtgattatttagaccgccattataagcttgccggtcaaacgatctttttggccagtgacgctggcccaggttacgaaccagctaagctattaagtctagttcctcaaagtgcacatggtgaatactttctcgaccgctatcattgtttgcagaaaattgaacatactttaggccggcacaacgaattagccatgcgagcaattaaagccgttcgtcatcatgatcaagcagagctaacaataattttagatacttatgaatcacaaaacctaacggaaaaacaagcagatgacctaatgcgtttaagaaagtatctacagcgaaattggcggtatatcctctcaccacaaatgcgtggatttaaggatattcatttaattggttcagtcgaaagttctcaccgggcttttacttaccggatgaagaaacagggcaagtcatggactaagcagggggctaaagccatgattggtttaattgaagcccgaatgaatggtgaactgcaagctagtttaaatataatcctagaacaattaacagttcttcctcgagtggctcaaaccagcctattacaggaaatgcatattcgaactggagagtttctaagaaaggcaccgacaaagccgtcaattggagcagtacaaggaataattccgattaacacggccacaagtagaccaatgggacaactttttaaggcactaacccactaaaactgtatatttaaaggctacctatgaaaacttgacagatacgttttaagataattacaagagttattattataaatgtgctaaaatatacggagatttaacaggaggctgaattatgattgaagattggcagcattttttattgccatatcaacaagccgtaaatgaactaaaagtcaaattacgggggatgcgaaagcaatttcaagaccaaacgcaacattctccgattgaatttgtaactggacgagtaaagccagttgatagtattaaagaaaaaatgattagacgacatgtgcaagaggatcgacttgagcaagatatgcaagatattgccggtttacgaatcatgtgtcaatttgtagaagatatttataaggtagttgacttattacggcagcgaagtgatatgactattttagaagaacgagattacgtcaccaatgttaaaccgagtggatatcgttcctatcatattgttattgaatatccggtgcaattaattactggagaaaaaagaatattagctgaaattcaagtacgtacccttgcaatgaacttttgggcaacagtagaacattccttaaattataaatatcaaggtgagtttcctgaggagctatctgcaaggttgcaaagagccgcagaggcagcatttaagcttgataatgaaatgtcagagattcgagaagaaataaaggaagcacagacattgttttctaagcggaggtcaactaattctattgatgaggacgagttaaaggagtaaattatgagaattggaatatataataatgaaacagcagaatctcaacgagtgacaaaggttttaaaggctgaaatgaaacgggcgggtttaacttatgtcgaaaaaaatccagaagttgtaataacaatcggtggagatggtactttgttatcggcttttcatcattatcaaaaagacttaaataacattcgctttgttggaattcatactgggcacttaggattttatacggattggcggagttttgaaattgatgatttagttgatagtttagtaaaagatagcggacaggcagtttcgtatcctctacttgctatgaaggctacttattctgatgggcagatagagaattatattgcacttaatgaatcaacaattcggaatgttacacgaacaatggtatgtgatgtgttcattaataatcatttgtttgaaaactttcggggggatggtttatgtatttcaactccaaccggttcaactgcttataataaatcagtcgggggtgccattgtcgatccaaatagtgttggctttcagttagcagaaatggcttcacttaacaaccgggttttccggacactaggctcaccgattatttttggcgctgatgctgagttaattttgcgtttgcgtgatgaaaatgggcatgtgcttacatgcgatcgtgatcaatggatgcttaaaagtgagaaggagcggtacctaactgaattatcttatagagtttctaagcaacgaatatattttgctcaatatcggcataataatttctggaatcgagtaaaagattcatttattggtggagtgcattaatggaatttaattggatatatgatcatcgcacaccacggaaattacgatcggcattaaaaatgtatggggtttcttcttcgttattaaaagtagccatataccatggaggaaaaatgcaaataaatggggtagataagtgggcagttgatactgttaattaccacgataaagtaacattaattctccctccggaaactgctaatgataatgtggatatcagtgaggcacctatcgatattatttatgaagatcaagactttttaataatgaataaaccggcaggagtagcgacagttccggctcataacgttccggtagccgatagtttggtgaatcgggtaaaaggctactataagcgccaaaattatgaaaatcaggttacccatgttgcgacacgtttagaccgtgacaccagcggcttagttgtttttcctaaacaccgatttgcccatgctgtcctagatgaacagttaaaaaaacatttagttaagaaaaactatcttgctctaattaaaggaaaagttcctgcagagcatggttatattgatgcgccgattcaacgcgatcccagttcatttgtaaaaagaatggtagggaaagaagggaaagcatctgtaactgaatactggcgccaagaatgtaatgttcaagcaagccttatcaaaattaggttgcatacagggcggacacaccaaattcgcgttcattttgctagccttggtttcccattaattggcgataaaatgtatggtgaagaatcaggattaattgctagacaagcactccattgttattggctgagcttttatagtccatttaaaggtgaaaatattactgttttggcaccattgccaagtgatttcaaaaacgctaaagatgatcttttaagtgcaaaagaatattagtaattgaattaattagtagaaaattaccagaagataaaattaatttacttactggtaatttttataaaaaaggtattgcaaataataaaaatatagggtaaaatgtaactattgtcatcgaaaagatgtgaataaatgatcatatctattaaaattattaagagtaaacatggttgtaaagtcactaattcttgaaatgattttctgaaaaactattgacatccacttgatgacatgatatattaataaagttgctgattgagttatcgatcaaaaggaattcaaaattaattaaattttcttcttgacaagctgatctgatgtatgttataataatcgtgttgattggctgcttgattagccaacgggtagacctttgaaaactgaacaaagtttcgacgaatcaaatgtgtagggtcttcattcacgatgtgatttgaagtaaaacatttgcgaagtcaattcgcttaataacaaagataatttagagctattcaagttcttgtatgttttatatgagagtttgatcctggctcaggatgaacgccggcggtgtgcctaatacatgcaagtcgtacgcactggcccaactgattgatggtgcttgcaccggattgacgatggatcaccagtgagtggcggacgggtgagtaacacgtaggtaacctgccccagagcgggggataacatttggaaacagatgctaataccgcataacaacaaaagccacatggcttttgtttgaaagatggctttggctatcactctgggatggacctgcggtgcattagctagttggtaaggtaacggcttaccaaggcgatgatgcatagccgagttgagagactgatcggccacaatggaactgagacacggtccatactcctacgggaggcagcagtagggaatcttccacaatgggcgcaagcctgatggagcaacaccgcgtgagtgaagaagggtttcggctcgtaaagctctgttgttggagaagaacgtgcgtgagagtaactgttcatgcagtgacggtatccaaccagaaagtcacggctaactacgtgccagcagccgcggtaatacgtaggtggcaagcgttatccggatttattgggcgtaaagcgagcgcaggcggttgcttaggtctgatgtgaaagccttcggcttaaccgaagaagtgcatcggaaaccgggcgacttgagtgcagaagaggacagtggaactccatgtgtagcggtggaatgcgtagatatatggaagaacaccagtggcgaaggcggctgtctggtctgcaactgacgctgaggctcgaaagcatgggtagcgaacaggattagataccctggtagtccatgccgtaaacgatgagtgctaggtgttggagggtttccgcccttcagtgccggagctaacgcattaagcactccgcctggggagtacgaccgcaaggttgaaactcaaaggaattgacgggggcccgcacaagcggtggagcatgtggtttaattcgaagctacgcgaagaaccttaccaggtcttgacatcttgcgctaaccttagagataaggcgttcccttcggggacgcaatgacaggtggtgcatggtcgtcgtcagctcgtgtcgtgagatgttgggttaagtcccgcaacgagcgcaacccttgttactagttgccagcattaagttgggcactctagtgagactgccggtgacaaaccggaggaaggtggggacgacgtcagatcatcatgccccttatgacctgggctacacacgtgctacaatggacggtacaacgagtcgcaaactcgcgagagtaagctaatctcttaaagccgttctcagttcggactgtaggctgcaactcgcctacacgaagtcggaatcgctagtaatcgcggatcagcatgccgcggtgaatacgttcccgggccttgtacacaccgcccgtcacaccatgggagtttgtaacgcccaaagtcggtggcctaacctttatggagggagccgcctaaggcgggacagatgactggggtgaagtcgtaacaaggtagccgtaggagaacctgcggctggatcacctcctttctaaggaataaaacggaacctacacatcggagaaactttgtttagttttgagaggtttacctcttaaaactttaacctataagacgcttatttgggcctatagctcagctggtttagagcgcacgcctgataagcgtgaggtcgatggttcaagtccatttaggcccatatggggaattagctcagctgggagagcacctgctttgcaagcaggaggtcatcggttcgattccgttattctccattatcaaccataaggttgatagagtttgtactttgaaaactaaatactatctaatttctttattaacaaaacaataaaccgagaacaccgcgttatttgagttttaattaacgaattataatcgctaactcaattaatcagacaatctttgattgtttaggttaagttatgaagggcgcatggtgaatgccttggtactaggagccgatgaaggacgggactaacaccgatatgcttcggggagcggtaagtacgctttgatccggagatttccgaatggggcaacccaatcagcttagtcgctgattacttgactagtgaatacatagctagcaagaggtagacgcagtgaactgaaacatcttagtagctgcaggaagagaaagaaacatcgattccctgagtagcggcgagcgaaaagggaagagcccaaaccaacaagcttgcttgttggggttgtaggactgaacattagagttaccaaagtgcgacgtagtcgcaacagttgggaagctgtgccatagagggtgaaagccccgtagatgaaacgtcacactctctgttcaggatcctgagtacggcgggacacgtgaaaccccgtcggaatccgcgaggaccatctcgcaaggctaaatactccctagtgaccgatagtgaaccagtaccgtgagggaaaggtgaaaagcaccccggaaggggagtgaaatagttcctgaaaccatgtgcctacaagctgtcggagcccgttaatgggtgacggcgtgcctcttgcagaatgaaccggcgagttacgattgcatgcaaggttaaggtgggaaaaccggagccgtagcgaaagcgagtcttaaatgggcgtaaaaagtatgtagttgtagacccgaaaccaggtgacctacccatgtccaggttgaaggtgcggtaaagcgcactggaggaccgaacccgtgtcagttgaaaatggctgggatgaggtgtgggtagcggtgaaattccaaacgaacttggagatagctggttctctccgaaatctctttagggggagccttgaggtaaagaatcgtggaggtagagctactgtttggacaaggggcccgtcatgggttaccaacttcagataaactccgaatgccattgatttatactcaggagtcagacgatgagtgataagatccaccgtcgaaaggggaacagcccagatcaccagttaaggtccctaaatatatgctaagtggaaaaggatgtggagttgcatagacaactaggatgttggcttagaagcagccaccatttaaagagtgcgtaatagctcactagtcgagtgatcctgcgccgaaaatgtaccggggctaagcatattaccgaaactgtggatgtgcactatgtgcacgtgataggagagcgttctaagggcggcgaagtcagaccgtgaggactggtggagcgcttagaagtgagaatgccggtatgagtagcgaaagacaggtgagaatcctgtccaccgaatgactaaggtttcctggggaaggctcgtcctcccagggtaagtcgggacctaagccgaggccgagaggcgtaggcgatggataacaggttgagattcctgtaccagttaactgcgtttgacgatggaggaacgcaggaggctaagcaaaccgtacgactggaagagtacggccaagcagtaagtcaggatgtgagtcaaatgtttacatccgtgttgacaagctgtgatggggagcgaaattaaagtagcgaagttgccgatgtcacactgccgagaaaagcttctaaggagtagttaactgcccgtaccgcaaaccgacacaggtagtcgaggagagaatcctaaggtgagcgagagaactctcgttaaggaactcggcaaaatgaccccgtaacttcgggagaaggggtgctggccgcaaggccagccgcagtgaataggcccaggcgactgtttatcaaaaacacaggtttctgcaaaatcgtaagatgaagtataggggctgacgcctgcccggtgctggaaggttaaaaggatgggttagcttcggcgaagctcagaattgaagccccagtaaacggcggccgtaactataacggtcctaaggtagcgaaattccttgtcgggtaagttccgacccgcacgaaaggcgtaacgatctgggcgctgtctcaacgagagactcggtgaaattgaaatccctgtgaagatgcagggtacccgcgacaggacggaaagaccccatggagctttactgtagcttgatattgagtgtttgtactgcttgtacaggataggtaggagccgtagaagtcgggacgctagtttcgacagaggcgctggtgggatactacccttgcaatatgaccactctaacccgcagcactgaacgtgctgggagacagtgtcaggtgggcagtttgactggggcggtcgcctcctaaaaggtaacagaggcgcccaaaggttcgctcagtatggttggaaatcatgcgcagagtgtaaaggcacaagcgagcttgactgcgagacagacaggtcgagcagggacgaaagtcgggcttagtgatccggtggttccgtatggaagggccatcgctcaacggataaaagctaccctggggataacaggcttatctcccccaagagtccacatcgacggggaggtttggcacctcgatgtcggctcatcgcatcctggggctgtagtcggtcccaagggttgggctgttcgcccattaaagcggtacgcgagctgggttcagaacgtcgtgagacagttcggtccctatccgtcgcgggcgtaggaaatttgagaggacctgtccttagtacgagaggaccgggatggacataccgctggtgtaccagttgttccgccaggagcaccgctgggtagctatgtatggacgagataaacgctgaaagcatctaagtgtgaaactcgcctcgagatgagatttcccatttccttcgggaaagtaagacccctcagagatgatgaggtagataggatggaagtggaagtgccgtgaggcatgaagcggaccattactaatcggtcgaggacttaaccaaggagcggtaaggtttattggaagagaatagataggatttagttttgagagcacaagctctcgtccgaagggacaaagagtgtggtgatgatggcttgaaggatacacctgttcccatgccgaacacagaagttaagcttcaacacgccgaaagtagttgggggatcgctccctgcgaggataggacgttgccacgctatagtaaaaggacatgcattgtttaatacagtgcatgtccttttttagtacgcccagcatggatattaactatgagttgaaaggtaagcagtgtaagcagtccatattgacacgttattgacagacaaaaaatccccgtagaaccgtccttgatggcttcacggggattttctattcgcaacattctttttgtacgttttttgaccacggcaaaaaagctgccagatcttgacaattgctctctggtaggtgatcaaacaagtattctaagtaccgctggacgttaagctggtttagtttagctgtctctactaagctatagtagacggcgttcgtcttggcaccttcttcggtttttgcgaatagacaattctttcgaattagtgttgatggccgaatactttgctcaactgaattgttgcttaacggtaattgtccattttcaaatacacgatacactcgtgattttaactggatggcgttctgaattgccttacgcaactgtccaatcggctggctaatctggctaatgtaattgtaaaatttatccattagcggtttgacatggatttgccgctgcactaacttctcattggccgtttgataactcaactggttttccgaatggaaaacctgactaagaagagttattgcttgttgcgctttggacgccttcattgtttttggcagtgctttgaccaatttgacaaattctcgtcgaatatgcactaagcacgaaccaaattttgcttgcggatagagttgattactataccctttatacccatcgcacatgataatacccggataattattaccgactatttgtccaatgattctaccagaacgcgtattggcatgatgaaagactacaaccggatgttgggcaaactctttcgttgtccgcgttacccagaaatagtcttgggatttaggactatcaacgactttaaaaggtgtttcatccatatgaatgactggttcttgtctaactgtattgcttaaatactgatacaacggctctaagtacgtttgactaactttaataatattcgaggccatttgcttggcgctaacaggtaatcccaacccttgtacaaagctttcttgccgatggaaaggcaacgccagattaaattttaaataggcgataaatgccataatactgcttgaaaagtaactatgtggtaataaagccattggtgccttactagttaccaatttatcatttccatcttgactacagtgtttacacttatagctttcctcatataagttggcacaatacaattcaggctcttttagtctagcttcccgtcgtgccaacctctttccaatgtgagccatttcgtgctgacaatctggacaggtggtcgtttttaaagaaacaacttcctcgacttgaggaagttggtctaaaaactcttgacgagttagctgtttcttcgctggtcgatgacgtacgatcttagtcgttgttgttttaactgcttcagtaatctcttgatccaagttcagatcatcaactggatcaaacagtgataattgtccatcagctacctgctctaaaacttcagtttttttccaaaaattatttcctgtagttgcttaatcgtaattgcttgttgttcaagttgttcttgagctttcttcaactgcgcacgtagtgcttcgttttctttctttaatgactcagccattgtacgtcacctccaatctaataaacttttgttattatatcagagctaaaacagtttaaaaagagcttagtatagatttcctggtttaattgtatgaatatgtcgctcgggaaatggggatagacctgtaaataaggcatttagttgctctggctttagttctttaacttcacttttgttcttaggccatcttaaactaccattttcatatcttttatatagcagaatgaaaccttcatcatcccaataaagggctttgaaccgatcattgcgactaccacaaaataaaaagagcgaattattatataaatccaatccaaagttttccgcaactaccatcgctaaaccgtcaattcctttacggaggtctgtcttaccacaaacaaggtaaacatgctccggtgcctgccaattaatgagcataacgaataaccactttagctatatcagtcgcaagactgggattagctcccttaaagatcgttaattcaatgttatcagcttgtagttttgcggtgggtcgaggaataaattcttccttattaactactgaattcttggtcttaaaaattggtgctacaatatcgtgttttccttccatagaaaaagcctcctgtactaagattgcttttagtataggagactaagtttttgatggctagacgtgtggatacggactgcttacgaaaaattaggcagcttaacaccggtacaataccggcatcaagctgcctaagaaactttgtataatttattgtctacttgacagggtccagttcacgctgttgatattaatttatttccacttcattacacacactggttctggacaactaacatctttttgaaggagagttaacttaccagttgatggatttcgtttataaagagtaaggttatcagagttctgatttgaagctaaaagataattttcatcttgatttagattgaaatcacgtggaaaatctccttcagttgaaatagattggatatgtttaacggtaaaatctggttgaacttcaaagacggcaatagtgttttcaccacgatttgatgtatagacaaatttcccatcatttgaaatccggatagcagctgctccattgtgagctgtccagtcttcaggaattgttttgagcgtttgaaggtgcttaaatgatgcatccttactattatacttgagtacttctagtttactgcttagttcacccaaaagataagcataattgccatttggatggaaaactatatgacgggtaccaaagccatcttcacacttatagcgagaaacagcagttaatttaccatcatcagagacatcgtaaaccacaacaagatccattcctaagtcacatacaactagacgattatcaggagttagatcggcataatgaacatgtggagcctcttgttcaggttcaggaccagttgctccttcatgaaggacagaatcagtttgtgttaacgttccatcttcgttgatcttaaaaacatctatttttgctgtatgataattagcactgaataataaatgccgtttgttatcaacgcctacatatgcaggaggagcaccggcagctaagacatcgcttagcatcttagcgttatcgtcatttaatgagtaagaagcaacgccccccttgtcatctacttgtttgattgcgtaaatacgaccatcttgaccaacttgtaagtaagctggtttttgagatggaattgctaattcaacgttcgttattttttcttggtcagtatcgagggtaactttgtagatccctttacttgtttttttagtataagttccaattagaaattgttcaatcaaggcaatttcctcctttttgaaaatgcttacctatataatagcaatttgcccatcgtaattctagctgtgatacactgttattagtaatttttagttgttaatggaggaaaaaagttgaaaaaagttgaacgtcaacgagaaatggtaaaaaataatcttgccctttttcaatgccctgtttgtgaacagccaatggatagagttgaaggaaatagtattatttgcggaaataaccaccgatttgactttaatcggcatggttatcttcactttcttaatggagcggctaatactgaatatgattgctcaatgtttgaatctcgtcgtcagctattaaatgcaggactatttaagccaattattgaaaatatcagtaaattcttaccttcaaaatctttaaggatcttagatgtaggaactggggaaggaacaccattattacaattagaaacaatccgtgctaactgtaatgatacgatgattggctttgatatttcgaaaccagggataacgcttgctactcagttaccgttaaaggcatttttttgtgtagctgatttacgtaaattaccttttaatgatgagagttttgattgtatattagagttgttttctccatcttattatcaagagtttaaacgggttctaacaaaagatgggacccttattaaggtaattcctaacgctaactacttagtcgaattacgtcacctcttatatgaaacaggagaacgtaattaccactatgataattcacgagtaatcgagttatttaaccggcattatcctcatagtaaagttgaaacggtaacctaccaatttagaattccagacggtttacaacaggcaatgctggaaatgacgcctttacactggggagcaaacgctaaaagattatctaaagaagaattaacccaattaaaaacaattacggtggatgtcagcttattaattgcgaaaaaagctaattaattattgcaacattactaaattagtgctaaattattataggaaatcgtttgataattgacatcgaatataagtgtttcgttggtaattatcaaggagtacttcattaaagcagcgtttcgccgtgcccacaccgagaccctgctttttttattttattaaggagattttattatgacaaaccatattgtcttgtttgaaccattgtttccagcaaatacaggaaatattgcacgaacttgtgcgggaacaaatactgaattacatttaattaagccattaggattttcaactgatgataagcatatgaaacgggctggattagactactgggataaagtaaagatcacgtatcatgaggatttaccttcatttatgaagactattcctgatattaaccgtttatatattgtttctaagtttgccactcatgattatagtgatgttgattatacgggtgaaggagatcattatttcctatttggaaaagaaacaactggcttgcccgaacgttttatgcaaaaatatccagaaaatgctatccggattccacaaaatgataataatattcgggccctgaatttatcgaatagtgcagcgattgttatttatgaggtattgcggcaacagagttttcctaatttagcccgcgttcataaatatgaattcgataaattaaagtaaccttaaggaggcaataatgcgatggcgagaagaaaaaaggcatcatcccgccggacaagagggaaaaaacaacagtatcgattaatggataatctattaggaataattgtttgcctcttaatgttagttggcttatttaatttaggagcattaggaacctttctcgataactgttttaagatttttgtagggtcatcctttccaattgcaatgattattgtttttctttatggattatgttttgcattgtatgggcatcgtccgcatttcaaaaaacgttggattgcaggaactattattgcctatattggtttattaatgtggcttcagacagtaatgtttcagcgtctgaatcttcatgcaaaggtaatcaaaactacttggaatagtcttagtaaggtcatttttaacggtgattcaactgttccggttggtggagggatgattggtgcttacctatataatggaagtaatattttaatttcagaagttggaacagcggtattgtcatggttgttaatgattatcggaattattgtcttttttgcattaccatggcgcgaatttctagtaaaatgtgggattggcattaaaaaatctggagcagccatggctaatgctcacgatcaattaatgaaaaagagaacggagagagcaaccaagacaactacggtaccatcgattagcgtgccccttgctaaagcatcaaggcaggttaaagatttttttgctgaccaagaatcagcagagccaacgtcaacgccgccagtttctccagcgatgcctgctcaagatcctgttgaaccaactattagggtcgcaggtgaaagtcaggtggaagaaactcagagtggacgtaaggatgatcaggactcgaaccaacgtgatgatgcggaaattaaacttgcaggaattgacgctaaagaagacaatgattatcaattgccgccagtcagcctgctaagtcaagtaaaagcaacagatcagcaggaagatttgaataatatcaaaaagaacaccaaaacgctccaacaaactctaaaatcttttggtgtggatgcaacagttgaaaatgttaatttaggtccttccgttaccaaatatgagttacgcccagcagtaggagtaaaggttagtcgaataacccatttggctgatgatttggcacttgcacttgcggctaaagatatccggattgaagcgccgatcccagggaaatcattaattgggattgaagttccgaaccagcaaattgcaacagttggttttcgcgatatggtcgaaaatgctcctagtaatgataatcccatggaagttccgcttggtcgcagtgtcactggggatatcaaaatggctgatctaactaagatgccacaccttcttatcgctggggcaactggtagtggtaagtctgttgcaatcaatgttatcattacaagcattttattaaaggctaaaccgcatcaggtaaagatgttaatgattgaccctaaaaaagtcgaattgagtgtttataatggtattccccatctactcagtccggtagtttctgaacccaaaaaagcagctcgggcattaggaaaagttgttgcagaaatggagcgtcgttatgaattgtttgcaaaattcggtgttcgtaacttggatggatataataagttggtcaaacaacaaaatgatgaccatcctgatgaagttcaagctaacctaccattaattttagttattgttgatgaattagccgacttaatgatgactgtttctcatgatgttgaagatgcaattgtccggattgcacaaatggggcgggctgctggtattcatatgattttggcaactcagcgtccttctgtcgatgttattacagggcttattaaggctaacgttccttctcgaattgcctttgcggtttctagtggggttgattcgcgaactattatcgatactaatggggcagaaaagctccttggtcgaggtgatatgttatttgaaccaattgatcaaaataagccagtccggattcaaggtgcatttatttctgatcatgatgttgaatcagtagtagactttataaaaaacgagcgagtagctgagtatgacgataatatggttgtaactgacgatgaaattgagcaagaagagcaagctgaagaggaagatgaattattccctgaagcattagattttgtggttgatcaacaaaaagcatcaacttcgctaattcagcggcgatttagaattggttataatcgtgcagcaagaattattgatgatatggaacaacgcggttttatcggaccagctaatggctcaaaaccacgggaagtttataagcaaaaaagtgaggaataaaaaagaccggagaaatttttctccgatctttttttattccgattacatggatgtttaataggctaaattaagtttaaggatgcaactgctccaaagattaaagaaccaagcattgcaattaacatgagccaaatagcaaccatggtaattttttggaaacgagttttcttttttcgctgcattattaaccatccttccatttttatcaataatagtagtgtaacgcatctttaatgcctttttcaaatctagttttagattatgttaaacttaaattacttatttaaagagaaggggactgaaaaggttgatggttagtattcaagttataattttagagattattttattattagtgattgggatagtagaacgattattagtacgaatatttcatcatcctaaaaaaacaaagcatttatggtggggatggacaattattttatggattctgataatctttaatattggattctattggccagcttatcctattgccttatggatgattctagctctgctattaattgctttacaaattattcacaatcatgaattcatttatcgccgttactggccagtattttggcggtattcggcatattatgctttaattatatatattggtagcttaattatttcaccatggttaccgttgatataaaaatattgagtgagttggaaaattaattttctgctcactttttttgtctattactttttggtaaaattcacaaaattacgtggtgagaagtgggggattgtggtagacttgacctataacgtggtaaaggaggacattagtcgtgttaatgggagaatttacacacactattgattccaaaggccgactaattattcctgccaaatttcgagaacaattgggggcacacttcattgttactcgggggttagatggatgtttgtttggatatccattaaatgaatgggcgattttagaacaaaagctaaaggcgctcccattaacaaagcgtgatgcacgtgcatttgtacgctttttatattccgctgcgacagattgcgaaattgataaacaaggacggattaatattccgataacattacgaactcatgcttcacttgaaaagaaatgtgtaatcgttggtgtgtctaatcgcttagaaatctggagcgctgaacggtggaataaatttacaagcgaaacagctgataattttgatgagattgctgaagatcttaatattgatttttaatggaggttttagttgatggcagaatttaaacatgtaacggtacttttaaaggaggccgtagcaggattaaatgtgcaaccaacaggtacctacgttgatgcaacattaggtggtggtggtcatacgcaagctattttacaacagctcgtcgatggccacctatattcatttgatcaagatcagacggcaattaattacaataaagaacacttaaaaacagtaatagagcaacaaaaattaacattaattgaagataatttccgcaacttaaaagcggaattggatagctataatgtaaaacatgttaatggaattttatatgatttaggtgtttcatctccacagttcgatgatgctaaaagaggttttagctatcagcatgacgcccccttagacatgcggatgaatcaggaacaaaaattgtcggcaatggaagttgttaacgaatggtcatatgaacggctcgttaagattctttaccgatatggagaagaaaaatttgccaagtcaattgctagaaagattgaacaacgccgaaagatagcaccaataaagacgacatttgaattagttgatgtgattaaagagggaattccagcagcagctcgccgtcatggtggtcatccagcgaaaaagagttttcaagctattcggatagcagttaacgacgaattaggtgctttagaggaatcgttagagcaagcattagacttgttggatgttggaggacgaataagtgttattaccttccaatccctagaagatcggttagtaaagacaatgtttcgtgaaaagacttcattaagtggggatgtaccgcagggattaccagtaataccagcgggaatggaaccaaacttcaaattaattaataaaaagccgattgtagctagtgaggaagaattagcggcaaatcatcgtgcgcatagtgccaagttgaggataatcgagaaaattagagaaggaaagtgacagaattatggtttcaaatgcggcaaggcaactggcgggagagcaacaaccgcagcaagcgccaagaaaaaagacttatcaacaactaaaaatttctccaagtccggttagatggtcaaaatttgaaagatctttagtagcagtaggtagcttaattacgctatgcttaatgattagcttactttctacaaaaattagtattaataatcagcaacggcgcttacaggatacccaaactcaaattactaaggcaaaaagtagtaatacaagtttgcagcaagaaatcgctgaattgacgactcaatcgcatttgaaatcagcagcacataaatatggattatcagataaaaattcaaatgtaaggaacgttaataaataatgaataagaagccacaacgaacgaaaaataggggacatagagaaaaccgagggacctttggcaaatggctctttctaatcacggttggattgtttaccttatttatcgttcgttttgcgtatatcgcaataaataaggatgttcaacatgttaacttacggtcacaagcggaacaaatttatacccagcagcgaattattcaagcgcgacggggtgatatttatgattcagaagggaatcccttggcaactgatacaagtaaatataccctctatgcggttttggatcgaacccaaaagtcttctgatggtaaaccgttatatgtaaaagatcgaaaaaaaactgccaaggtattatcacagtatattgacctgaccccaaagcaaattgaaaagattcttaaaccaaaagggcaagcctaccaagttgaatttggaaatgctggaagcaacctttctgtttcaacaatgcagaagatcaagaaccggcacttgccaggaattaattttattgcgactccagcacgtcaatatccagaaggcgaatttgcttctcaaataattgggatggcaactcctaaagttaaaaatgataatggaactgaagagaccaacttagtgggacaattgggcttagaaggctactttaataaacaactgacaggaataaacgggttgagaaaagataaacaggacgtctatggataccaaattgctaattctaagcaggtaactaaaaaagccgtcaatggagataatatctacactacccttgattcacaaacccaacattttctcgaaaataaagttaataaagtttataaaagttctaacgccaatgcaatgactgcagttgtaatggaagctaaaacaggtaaaattattgccgctacgcaacggccaactcttcatgcagaaaataatcctgtttggcggaatatgttagttcaagatgcttatgaaccaggttcggtaatgaaaattttgtcattagctgctgctattgataccggacattttaatcctaatgcgacctttaattcgggaacatgggctatgggtggcggaaaaatcactgattggtcaagttctggttggggaacaatttcctataaagatgcttttgatatgtctagtaatgttgggtttgctcatgtagagcaggacatgggagcagagacatggatgaagtacattaaacgatttggcctgttaaaaaaagttaatgttatcggaatgagtaacgaggttaatggttatacttcattcaaagggattcttgctcaggcaaataccgcttttggacagggaattactgtaaatgtcatgcagatgatgcaagcgtttagtgctattggcaataatggtaaaatgatgaagccttacattgttagcaaagttgtagatggtaatagcggaaagacgattcaaaaggttaagcctaaagttgttggacacccaataaaagcatcgacagcgaaaaaggtccttggttacatgcaaggcgttgtttatgatcaaaagggccttggccatgattaccaaattaagggttaccgaattgctggaaagaccgcaactgcacaaattggtggtgctcatggttattcaactggtgatacaaactacctttactcctttgcagggatggcaccagctaaaaatccaaagtatattatgtatgtcacccttcgccaaccgcaaaaccttaaaaaaacagcaaccaaacaaattgccagcgtctttaatccgacaatgaaaatgttgttgagccaacaaaaagttgcagaaaaggtcaagaaaaaggttattacaatgcctaatgttgttggtcaagcaagcgatgaagctaataaagaattatcaggtaaaggaatgcaggtaattgttgtaggttctggcaagaaagttaaacaacaatcagcagttccagacgaacaagtgttaacagatcaacatgttattcttgatactggtggcgagtataaaatgccagatatttctggatggagttctgcggatgttcaacaattagctaaggtccttaagctaaaagtaaaagaaaatggaaacggctatgttactcagcaaagtattttacctgatacaactattaagcgtggaacaactttaaccgttcaatatgaagctaaaaactagcagagaaactaattggaggtaaatatgaatttcttaagtgcagttttgactattcttagttcattcttaattacgtttttattgatgcccacgttaattaaatattttcgggctaaaaaagaaggtcagcaaattcgtaaggaaggccctacctggcatgctaaaaaggctgggacgccaacaatgggaggattattgttcatcttctctgcagtagtaacaattttatgggttgctgcttggcaagggttaattacgaatacgctgtgggcactcctctttgtcctggttgtttatggcctgattgggatgtgggatgatagtattaaaatcttccaccatcaaaatgaaggatttaaaccatggcaaaaggcgctatgtcaggtattagcagcaatggtctttacagttatttaccaacatgaaggttttcaaatgggctttggaacaactcaaattggttggctttacggtttgtttattattttttggatcgtcggcttttcaaatgctgttaatttaaccgatggacttgatggcttggtaagtggtctttccattatttcttttgcggcttatctaatcattgctttagtaaatctcaatcaaccaggttatcctgaaattgctcttttctgtttagcaatgatcggaactttactaggtttcttcccttataatcataagcccgctaagattttcatgggtgatatgggatctttagcaattggggcatccttagccgctgtttcattgttattacatcatgaatggtccttattagtaattggaattgtttatgtttgtgaaactgctagtgtcattcttcaagtggcttcattcaaaacaaccggtaaacgaatttttaagatgaccccaatccaccaccattttgaaatgaacggatggagtgaatggaaaattgatattgtgttttggcttgtagggttagttgctgcaattattgccgttacaacaatcttattagtaggttaggagtaaagagaaatgaaaaaaattgatgaatatcaaggtaaaaaagttcttgtaatgggtttcggaattagtggcattaatgcggctcacttattggtaaaacttggtgccaatgttaccgctaatgataaagcaactcctaaaaataatgatattgttgatgatttagaagctgatggaatcaaggtaattactggtgataatcccatttcattagctaatgaaggtttcgatattgtagtaaaaaatcctggaattccttatgataatccattagtggctgcattcgttaagcaggggacacctattattacggaagcagaactaggatggcaaatttttgatggtcaccttgtaagtgtaactggaagtaatgggaagactaccacaacgactttaactcaactaatgattgctgaaaatgcaaaatatcaagtgaaatatgcaggtaatattggaatttcctttagtaaaattgctgaggatttagggccagacgatacattggtcacggaattatctagtttccaattattaggagcaccaacaattcatccgcatattgcaattattactaacattttttctaatcatttagactatcataagacacgagaaaactatattaatgcaaagcttaatattacccggaaccaaaccaaggatgatttcttagttattaactgggatcgtgatgaatggcaaaagattgctcagcgtagtcaagctaccattgtgccattttctcgtctcaataagagtcatgaaggatcttatgtagaagatggaatgatttactggcgtggacaagaggttatgccaaccaaagatattcgattgatcggtccccaaaatgtagaaaatgcattggcagcaattgcagcggcaaaattaagcggtgttacaaatgatgcaataaagaaagttttaacaacatttagtggagtccgtcaccgcttacaatatgtgatggaataccaagaacggcttttctacaatgattcaaaatcaactgatattgaagctactgaagttgccttgcaaggctttgatcgtccagtagttcttttggcgggtggccttgatcgtggttatacctttgaacggttggttccttactttaagaagcatgtcaaggcaatgattgtttttggtgaatgtaaagataaaatgaaggatgcggggaatcaagctggagttccagtaattgaaagtgaaaatgcaattactgcggtaccagaagcatggaagctgagtgaaccaggagatgtcattctcctctcgcctgctaatgctagttgggaccaattcccgagctttgaagttcgtggtgataaatttattgaagcagttgaaaaattaacaggaaagaaggaacaataagatgcggttattggtatcaggtggtggaactggtggtcatatttacccagcattagcattaatcgaacgcttaaagcaggttgatccagatactgaagtgttatatgttggaacaacccgtggccttgaaaataaaattgtaccggatgccggaattgagcttgaaacaatgcatatgcagggctttaagcgttctctttctcttgaaaattttaagacaatctatcttttcttaagttctgttcatcatgctaaaaaaattattaatgagtttaagcctgacgttgttttaggtacaggtggatatgtaagtggagccgtcctatatgctgccgcaaagaaacatatcccaaccgtaattcatgaacaaaatagtgttgttggtgtaacaaacaagtttttaagtcggtatgttgatcaaattgcaattgcatttgaagctgcacgcagtcagttccctgctgataaagttacaatggcaggtaatcctcgtgctcaacaggtagctgctaaaaaagatagtgacttttcatggacaagttatgacttgaaagatgatattccaaccttaatgatttttgggggaagtcaaggagcaccaaaaattaataaaacagttgtcgacgctattccagaattcaataagcgtccttatcaggttatctttgcaaccggtcaaaaacggtatgatgatgtaaaaaagcaacttgcagaaaataatattagaccagctgataatgttaaagtcgttccttacattaaagacatgccggctaagatgcctcgagtggcagctttagtatcgcgcgcaggagcaaccactattgctgaggtaacggcactcggagttcctacaatcttaattcctagtccgtatgttaccgctaaccatcaagtaaagaatgctcaagctttagttaagaataacgctggcttgatgattactgaagataagttagatgcccgggcattattgactcaagcagataagattatggaagatgaagaagtgcgtaaagagatggcgcatgctgctgaaaagatgggtcggccagatgccgctgatagactaattaagatcttacataaggcaattgatgaacacgaaaaataaagtatagcctaggaaggaggaggagagatgttggatgatagatctgcgattgagcatcataaatattcacagcggttaactgaattagaaaggcgaagtgctgctgcccaacagcgacaacagaaaaagaagcctccaaaaatgcatgttggtaataagattcgcgggattaagattaagcgttatgtttctaacggcgagcgagtcttaaaattagttgtattgttcagtgctattctcctctttatgctttatattatttctcccttaagcaaaattaccacgcttcatgtaacgggtaatcatgacttaacaaaagagcaagtagaaaaaaatgcaaatatttatccaggacggtttatttggggcgtttatcttgctcgtcatcaactcactaaacaagctattcgcaaaaatcctcaaataaaagatttaaggatcaaggtaaccggtccccagtctctgcaaatatctgtaaaagaaaatgcgcttttaggaacagcggtgatgaataatgatacatacgctgttttagctgacggccaattacagcgaacaaaaaatgctgataatggtattgcttataaacgttttgatggtcataaaaaagttcttgctacaacggccgctcagttaggaaagctgaaactggcaataagaaatggtatttcaagtgtgagttatcaacccactaaagagtatccagatcgcgttattatttatatgcgtgatggtaatacagtttatggcgacttaaatactatcggggataaaatgggatattaccctgcaattgcagcaagtatgaaaaataagggaattatagatcttcaagtcggagcttattcttatgactatggatctaaggataaatgattttgtgaaaaaccttgataattcccttttttgtcattgtttatctgtggtaaaattcttatataggttaaaatacaattaatttaattaatgatagtcttaggagggttccttttagaatgaataattcagaagtatacgttggattagatattggaaccacctcgatcaaggcactggtgtgtgaaagtgttaagggtcagttgaaagttattggtgttggtgtagaacgatcggcaggattaaaccgaggagttattgtcgacattgataaaaccgcccaggcaatttcggcggcggtagcacaggccgaggaaaagtccaacgtagagattcaaagtgttgtagttggcttaccggcaaattacttacaaatgcaacgagtacacggtatgattacgattgcaacaagaggacaatcaagagagattgttaaccaagacgtaattgacgttgctcgtgaagcgttgacgcaaagtattccccccgagcgggaaataattgatttaattccaacagaatttactgttgatggcttttctggtattaaggacccccgtggaatggttggtgtccgtttagaaatgaaggccaccttgtatacaggacctaagaccattattcataatacaaaaaaggcagttcaacaggcaggttatgacattaaagattttgttattacgccgatcgcaacagactttaacctccttaatgacggagagcaagattttggtactgttgttattgatttaggtggtggtcaaacaacgaccagtattattcatgatcatcaattaaagtatacttatgttgatcctgagggtgggaaatacattactaaagatatttctacggtcatgaatacatcattaaaaaacgctgaacaacttaagctaaatcatggatatgctatggcatccttagccgatgaagatgttcaagttgacgttgatgttgttggtcaaaatgatcctgtccaatattcagagcagtatttatcagaaataattgaagcacgagtaaggcaaatttttgatcgtattcaggataaacttaaggctattcatgcccctgaattaccgggaggagtagtcttgattggtggagtggctgctctgccaggagttaaggaacttgctgaacagtactttactggtaatattaaggtgaatgttccagaacaaatgggcattcgtcaccctcgctatgcggttagtttagctttggggatgtatgaaaatcagttatcagatattgatcgattaattaagcaaactgttcaacgaattgatacgattaagagtcctcatgaagaaaaaagacaagttgttaatcagccacgtcaacaatggactgaaaaatctgataaattacaacgttcacagcgagaagcacagcagcaaccagttactgaagagccagcgccaaagaagaaaaagcaaaatggcctaagtaatcggtttaaaaacatttttaataatttatttgactaatttggaggaatactgctatggataacgaaacgttcgctaacgacaaccaatttgcggaagcgcaaatcaaagtaattggtgttggtggagctggcggtaatgccgtcaaccgaatgatcactgaaaaagtacaaggtgttgactttattgttgctaacaccgacctacaagcattaaataattctcaagcaacaactaagatccgcttaggacctaaattgacaaagggattaggtgctggttcaaatccagaagtaggtgaaaaagctgcccaagaaagtgaagaacaaattaaaaaagctcttgaaggcgcagatatggtcttcattacagccggaatgggtggtggaactggtactggagcagccccagttgtagctaagcttgctaaggatagtggagcattaactgttggtgttgtgactcgtccgttctcatttgaaggacctcgtcgagcacgctatgctgcagaaggacttgaaaagttaaagtcaaatgttgatactttaattatcgttgctaataaccgtttattagagatgattgataagaagacgccaatgatggaagcatttaaagaagccgataatgttcttcgtcaaggtgtacaaggtatttcagacttaattgttaccccaggttacatcaaccttgactttgctgatattaagacattgatgtctaatcaaggttctgccttaatgggggttggtgcttctactggtgaaaaccgtgctactgaagcaactaagaaggctatttcttctccattacttgaagtgtcaattgatggggctcaacatgtcttgatggatattactggtggtaaagacttatcaatgtttgaagctcaagaagcatcagatgtgattaaacaagctgctggaactaatgttgatatttcatttggtatgtccttaaatgaatcaatgggcgatgaagttcgcgttactgtaattgccactggaattgataagaaaaagaaaattcaacaacaaaagccagcggaaaaagaagcaccacgagtaactcggcctattccgcaagaagaacaaccaaagcaacgagatccttttgatggttggaatgatccaacagccgatacaagtaaccaatcaagaaattctgataacgaattttctcacgttactaagccagaatttaacgtatttaacgatgatgcggctaatacggatgacaatgatgatactaacttatcgactccaccgttcttcaagaatcgtcgtaagtaaataatttagcaaaaaggtggattttttaatccgcctttttctgtttagacctattaaggagggtaatacaatggcagcaaattttttaaaaagcctatttggtgaagaagacattgatgaacaagatggtctctatgaaacgagtgaacaagtttcaacgccagcaaacacaagcaacaaagtagtttcaattaatagcgggcgtcttaacaaaatgagtcagatttccttatacgaaccccgtctttatgcagatgtaaagcagatcgcatcccaattattagaaggacatgcggtgatcgttaatttcactcaaatggatacaaatgttgcagcacggttagtagacttcttaaatggcaccgtttttgcaattgatggtgaaatgaaacggatcggaaaggaaattttcctctgcacccctaaaaactatgaaatctcaggtagtttaacgagtaatctaaaaaatgatggtgataaattttaatcactaaaaggagttaatatgatcgcatttttattatgggctcttaatcaattagttgatgcttatatcttagtgatagttgtgtggtgcattatgtcatggtttccaaatgcacgtaattcacgactcggtgatgttatcaatcggttggtaaaaccttatatgcattggtttgattttattcctccaatcggggggataagttttgcgccgatgatcgctatccttgtactatattttgttcaggcaggattagcacatatagcagcaatcatttaattaatactaagaggaagtaaatttgagcgaagataatattaaacaacattttcgtccggatgaagccacccttattgaccaagcaaatgactgggtagccactgcagaaggtcaatatcgtcctgtcctcactccttttttaaatccacgtgaacgttttattatccaaacgattgttaatcgaaataacaatgttaaaataacaatgtatggtggttggcaaggcgcagaaatgcaacgagttttaatttatccgccttattatgaaccctctatcgaagactttactttacaggctttagagataaactatcctgttaagttttcagaacttcaccatcggcaaattatgggaacattaatcggtgaagggatggagcggaatgcatttggtgatattttaactgatggagcgcattggcaagtgatcgtaacgaaaccaatggcagagtatttacggaaaaacgttgagcacgttggccgaattaaggttaaatggattccgatcgcaacagaagcagtggtaacacctaaagaggaatgggtaccgatagttacaacagtttcatcactacggttagatgttgtgatagctgcaggctttaattattcacgaaaccgggcaaagcaattaatagagcatggtcaagttcgattaaactgggaagagattgattgtccagattatcaaattgtggttcatgatttgatatctgtgcgtcatggtggtcgcctcagaatcgatatgaccaatgggaaaacaaaaaaagacaaagaaagaattaccatttcagttgtaaatgcgtaatttgaatggaggaatttactcatgagtttgacggttgatcaaattaacaataagcaatttaatactaagatgcggggttataatcctaaagaagttcaagaatttattcaggaagtttcacaaacggtccaacaattaataactgaaaataataatttacaagagcaagtacgggctaacgatagcaagattaagtactttgctgacttgaaagattctttaaataagtcaattttagttgctcaagaggccgctgataaggttaaaaataatgctaagcgtgaagcagatattatgattcgtgaagcgcaaaagcaagcaaccgatattgtttcggaagctaatgataagtcaaatcaagtaattgaagacgctgctaattctactaagaagttaacaagtgaaactaatgatcttcgtaaacagactcggatcttccgtcaacggcttcaagtcatgcttgaatctcaattagaagtcattaagagtaatgaatgggacaagcttttggaaaatgatgacttgagtaaatatgacgaaattgaaaaaattttaggtagtcgtcttgacagcagttcaccaaccagtgtagaatcaactgcaacaactgctagtgaagaacaacctgttgaatcagaacagccagttgcttctgctgaacaaacagaagaagagagtacacctgtacaaccaacagctgttaacgatgacaaaggatcagatgcacctgaaactgttgttgtcttccctgataataacaagtaaatcactagaatcgtattttaataaaatcgttgaagagaattggaataattatcataacgttgaagcgagtcaacaattggtgagaggttgataatgtttaactattcctgatcatctcggagtacctcatttgagttagttaggatgaggcggttcattatcgttatctaatgacatgaggaaactttaatcttaaagttttaaatccgggtggtaccgcgaagaagcttcgtcccagtaatgggaggaagcttttttattattaaaatacaagaattaatgaaaggggtagttacaatgcgtgttaaagatacgttaaaccttggccgtactaaatttccaatgcgcggaaagttacctgtaactgaggcacaacgggaacagctatgggaagaaaataaagtttatgaactacgacaaaaactaaatgaaggaaagcctacttttgttttacatgatgggcctccatatgctaatggtaatattcacattggccacgctatgaacaagatttctaaagattttattgtgcgctataagtcaatgtctggctaccgggcaccttatgttcctggttgggatactcacggattgccaattgaacaccaattgactaagtccggttacgaccgtaagaagatgagcttaactgaattccgtgatctttgtcgggaatatgcccttaagcaagttgataagcaacggactgactttaagcggttaggtgtaagtggtgaatgggatcatccataccttacccttgataaagaatttgaagctgctcaaattcgggtattcggtgaatttgctaagaaaggtctattataccaagctaagaagccagtttactggtcatggtcttcagaatcagccttagcagaagccgaagttgaatatcatgatgttgttgctaaaacagccttcttcgtagagcaaattaaagatggcaaaggccgtttagataatgatacatatttagttgtatggacgacaacaccatggactgttcctgcttctgaggcagttgcggttaatccaaagtttgattactctgttgtaaagccagcaaatgatgaccggaaatttgttgttgcaacagacctgcttgagaaattagcagaaaaacttgggtgggaagattatgaagttgttgatcatttaatgggtcaagaacttgaagggatgactactcaacacccataccttgatcgtgatcttcttgttggtttagcagattatgttactgctgatgctggtactggccttgttcacactgctcctggatatggggatgatgattacaactttggtaaaaagtatgacttgccaatttttgccccaatcaatgatcaaggtgttttaactaaggaaaacggtgaaggctttgaaggggtattctaccaagatgctgatgatgtatctcttcaaaagctagaagaaaacaatgctttacttcttcaagagccattacaacacagttacccatttgattggcggacaaagcaaccaatcatcttccgggcaactgatcaatggtttgtatcaattgaaaagatgcgtcaaagtattttggacgccttagaagacgttaagtaccacccagaatggggaaaggttcgtcttcgcaatatgatcaaagaccgtggtgattgggtaatttctcgtcaacgtgtttggggtgtacctctaccaatcttctatgctgaagatggcacaccaatcatggaagaagaaacaatcaaccatgtagcagaattatttgctaagtatggttctaatgtttggtttgaacgtgaagcaaaagatcttttgccagaaggatacactaatgaacattctcctaatggtaagttcactaaggaaactgacattatggacgtatggtttgattctggttcatcacaccaaggggtattagctgaacgtgattatttaacatacccagcggacctttaccttgaagggtctgaccaataccgtggttggtttaactctagtttgattaccagtgttgtatgttcaggacatgcgccatataaggaaatcgtttctcaagggttcacacttgataagcgcggtaacaagatgagtaaatctcaaggtaacgttatcgatccaaataaggttgttcaacaaatgggtgcggaaattatccggttatgggtaatgagtgctgatacttcagctgatgttcgtgtatcgatgggaacattccaacagatttctgaagcatatcgtaagttgagaaatacgttccgcttcttacttgctaatactagtgacttcaatcctgaagaaaataccgtttcttatgagaagttacaatcggtagacaagtacatgttggttaaacttaaccacttcttaaagacaatgcgggaagattttgataattatgatttccttgatgcttataaggcattgatcaactttgtaaacaatgacctttcagctttctacatgaacactgccaaagatgtgctctatattgaggctgaaaattcagaagttcggcggtcaatgcaaaccgtcttctacgatatccttttgacacttgttaaacttcttacgccaattctccctcatactacagaagaagtatggagctacatgaatgaaccagaagattttgttcaattaactgaaattccagatccacggacattcgctggcgaagaagagctattgagcaagtgggatgactttatggaagtacgttcacatgttctgaagagtcttgaagaggcacggaatgctaagctaatcggtaaatcacttgaagctcaagttgatctttacttaaccgatgatcaaaagcaattacttgatagtcttaatgaaaacattcaattattgctaggggtttctgctcttcatgtccatccagctgatgaagcgcctgctgatgctgaccaatacaacgatggggtagcagttaaggttacaactgctaatggtgaaacttgtgctcgttgtcgcatggttaaggaagatgttggcagtgatccagcatatcctgaattatgtgctcgctgtgctgcgattgttcgggaaaatttccctgaaacagcagaagatggtttagaagaataatctctaaaaaaactggttttcgttatccagtaaatgacaattatttttaagcggtgtaaaataccaagtgacacttgttgcttggtattttattatggagttggtaaaaatgctcaaaggaaaagtaaaaagttttgacgaacaaaaaggatggggctttattacagttcctcacgaaggagaaatttttgttcattatagtggaattgaaggaacgcgtcgtcgtatccttcaccctgatgaagaggtctcattagtaattgttcaaggacaaaagggaccacaagcagcacatgttcgtgttttaagataaggatgggttctaatggaatttgaagagcgaccaataagtagtaaaacagtttttcacggccatttaatcgatgttgaagtacagcaagttatcaccccacatggtaataaaacacaacgagaaatcgtccaccatgcaccagcaattgcgattttggctttgacggctgataataaaatgattcttgaaaaacagtggcgcgcaccaattgcgaaaacaacccttgaaattcctgcggggaagctcgaccaacgggatgctgataatgctcttcatgcggctaaacgtgaattaaatgaagaaacaaggtatgaagcaacaagtttaaaaaagatttcttcattttatacttctgttggttgtatggatgaatacatgactctttatttggccacgggattaaaacgggttagcaacgagctgccgcaagatcaagatgaacaattgatgttaaaagaagtaactttaccacaagcgcttgaaatgattgatcaaggcgaaattgaagatgctaagacaatcatggcaatctattactggcaaggaatgaacaaccgtggataataaacaacaagatgagcaacaatcacgtatgtcacgtagtcaatatcgtcaacagcaacgtcagactgaacaacctaatgaagcggcagaaaatacaactgatcgaccttatagtcgcgaagcagttgctagtcagcgtcatgacgaaacagtggcagaaaaaacagcgcgcttgaagcgtcgcttaaatattgcaatcattgctttgattgtggcaattattattgtttacttaatactattttatgttggataaaaaggagaaaaatatgcgatttggaattatttgtgcaatgcctgaagaaattaaagaattaactgcgaagttatctgataaacaagaaaaggaaatcgggggtaaatcctaccttttcggtaagatcagtaatcaagacgttgtattagtagaatctggaattggtaaagtggaagctgggattactactgaacatttaattaccgattgtgaggcagatgttgtgattaattctggatcagctggcgggattggtgaaggcttacatgttggggacattgtaatttcaactgaaacggcctaccatgatgtcgatgcaactgcatttaattaccgttatggtcaactcccagggaaagaaccgcgctttaaggcttctgatcaatggggacaagccttagaaaaagccggcgaaaagactggtttaaatgtaaaacgaggattaattgtttctggtgaccaatttattgcaagctcagaagcaattaaaaagattttgaataatttccctgatgcactttctagtgaaatggaaggggcagcggttggacaagttgccactgaccaccaaattccatatgtggtagttcgggcaatgtctgatacaggtgatgaagatgccggcgttagttttgacgactttattattgatgccggaaaacgctctgcaaacatgcttcttcagctctttgcagatttagataagtaaatggaaggatgaaaaactcgtgagtgagatttatttggataatgcagcaacaaccccaatgaccccagaagtgattgcggaagtgactaaacaaatgcaagaatcatggggaaatgcctcaactggttactcttatgggcgtcatgccaaacttgtaatggaagatagtcgtcacgttcttgcccaaagcattaatgctgatgataatgagattatctttaccagtggggggactgaaagtgataatactgctattatccaaactgcttttaaacggcagaatcttggtaagcatattattacaactgccattgagcatgaggcagtcttaaaacctctccattttttagaagaacatggctttgaggtaacctatttgccagttgatgaaaatggtaatatctcaattgatgattttaaggccgctcttcgtgatgatacgattttagtaaccattatgatggaaaacaatgaagtgggtagtcaaatgcctatccatgagattggtgaaattttgaaagaccatcaagcatggttccatacagatgcagttcaagcatatggactgttgccaattgatgttaaagctgatcatattgatatgctttcaacatcggcccataagattaatgggccaaagatgatgggatttttatatcgtcgtgatggcattagttttccaagctttattaagggtggggaccaagaaactaaacgccgtgcggggactgaaaatgtacctggaattgccggttttgctaaagcggtagaattaaacacgccggaggtaaaagaagaacgccgtgatcgttattatgcctttaagcaaaagatcgttaatgcgcttaaggaaaataatgttgattttgaaattaatggacaaatcaacaaaacccacgtgcttaacttatggtttaagggaatttcaacttatgttatccagacagacctagaccttgcaggcatcgcagtctctggtggttctgcatgtacagcgggtagtattgaaccttctcacgttttaacagcgatgtttggcgctgatagcccccgaattagtgaatcaattcgaattagttttggtgggttaaatacggaagaagatattgatcagttaattgctacgattgttagaaccgttgaaaacctaaagaaaattaatggggacaattaaaatggaatttacaaaaacagtacaaatttctggtgataaggataaatacacaattagcccagagataaaaaaatatgctttacttgatttgggatttgaacagactaaccggggaaactttgaatatttaggaagtctcgatactgataacccatttaaaccggttgcccgtcttcggattttaattaacagtgatttagacggttttaaaatggagactctttcaggaaatggtttaagaaaaattaatatttttaatcaccaacgcgcagctgaatttattcaacaatatcactatattttagatgaaatggttgcccggcaaatattcactaaataaaaactgtgcagggattgaaatactctggtacaatggttatcactggatgcatgcgaccttcaatcgtagattattccagaatctatacgaaatgatggtgataattaatggctgataatagtcatacacgtgtggtggtaggaatgagtggaggagtcgactcttcagtgacggctcttctcttgaaacttcaaggatacgatgttgttggtgtcttcatgaaaaactgggatgacactgatgaaaatggtgtttgtactgccactgaagactacaaagatgtagcaaaagttgcttctaagattgggattccatactattctgttaactttgagaaggaatactgggatcgggttttcaagtatttcattgctgagtacaagaaaggtcgtacaccaaatcctgatgttatttgtaataaagagatcaagttcaaggcttttattgaatatgctaaccaattaggtgctgattacgttgctactggacactatgctgatgtaaagcgtgatgagaacggccggatgcacttgatgcgtgctaaagaccaacacaaggatcaaacttacttcttaagtcaacttgattataagcagttggataaggtaatgtttccattagctggctacactaagccagaaatcagaaagattgctgaagaagcagggcttgctactgctgataagaaggattctgttggaatttgctttatcggtgaggatggtcattttcgtgaattcttgagtcaatatattccagcacaaccagggaatatggagacccttgatggtaaggtcgttggtcagcatatgggcttaatgtattacaccattggtcagcgtcgtgggcttggccttggtggtaataaggaaagtaatgagccatggtttgtaatcggtaaggatatgaagaagaacgttctttatgttggtcaaggatacgaaaacagctatctttatgctactcatcttgaagcgagtgatatccactgggttgatgatgttgtaagtcgttatgggcgtgattttcattgtacggccaagttccgttaccgtcagacagatgttggcgttactgttcatttgtcagaggatgatcaaatggtaacagttgaatttgatgatcctgcacgggccatcactccaggtcaagcggttgtcttttacgatggagaggaatgccttgggagcgcgattattgatcgtgcttacagtcatgaccggcagcttcaatacgtttgattcatatttttagaccttaaagaaggcagaggtaatttcgcttttgccttcttaaatatacataaagtaataactctgtgataaacaattgccgcaaactctggtaagatagtaaataaaaggggtaacgacagagatgacaaaagtttatttaatccggcacggaaaaacgcaatggaatttagaatcccgttatcaaggtgccaatggcgattcaccgttattaaaggatagttatcgtgaaattgaattattagcaagttctttacaaaggattccgtttgaacacgcttatactagtcctttaaagcgtgcgcgcgtaacagctcaggcattattgaaccatttgaatccagaaatcccattaacaattgatagccggttaaaagaatttaatttaggcaaaatggagggaatgcattttgaagatgttgcggcaaaatggcctgaagtcttaaaaaactttcgtcatcatcctgataaatatgatgaatcattagtagaaggagaaagttttctagaagtaatcgctcgtttccgtgcagcaattgaagagtattgtcgccagtatcctaatggtaatattctcgtgatttcacatggagctgccttgaatgctgccattaatgcattgattggaacaccgcttgctcacttgaaagatcgtggtggactaagcaatacatcaacgacgattcttattactaatgatggtcgtcattttgaacttgaaaagtggaatgatacatcttaccttcacaagagcaaggttgatccgactgatacgatttaagaggtgatattaatgacagagaaaaaaggttttcgtgatcctaagaaaaaggaaacagaaaaattagttcataaactagttgaagcaattgatgagcacccagataaagtaaacaattattatgatttaggttctttgctaacccggttaaatgactatcaacaagcagaagaactctttatgaaggctttggggatctttgaggcaaagggtgacaaggatgctatgaacctcttaaactatggtcttggtaacctttactatgagattggcaaagttaatgaagcaattaagctttacaataagattgatgatcccaaactcaaagctgattcttatcttatgttagcccaaagctatatgaaaaagggacaatacaagcaagccgttgcttatggattaactgcccttgaattacgtccagacgatcctgaaattaatcaggtaattggtgattcattattagcattaggtgaatttaaacaggctaaggcttattatgatgcaattctaaagtatcatccgggccgtgctgatacgcaatttaaccgcggaattgtagcgatggttcttggtgaaccatacaaagactaccttgcgcaagctaagcagttagatcctaactactaccataagagtgagcaacgacttaatgatattgaaaaagcgcttcaggcaacgcaaaagaaaaattagcaacatgaaaggatgacttctatggctgaagaaatcgacctatttaagacgccaacggagccgtctttttttattggtcaggtacaatctgagatttttactagtccagattcgttttttaaagttttaattgtctcggttgaagaagcaaattttgattggcacgagccggaaattactgtaaccggaagttttggtgatcttagtgatgatcagacttaccgctttgagggaaaaattgttgagcatccacgatatggacaacaatttcaagctacttcttatcatgtcaaccgtcctacaagcaaggatgggttagttgatttcttgtctggaaaacaatttaccggaattggaaaaaagacggctgaaaaaattgtcgacaagttaggaacagatgcgattaataaaattattgctgacccgcatgttttagataaattaaaactccgcaaagcagttaaggattcattggttgataatttacgggcaaaccaggggatggacgagattattatcggcctaaatgatctcggctttggcgctaaccttagtagtgcaatttttgacaagtacggggaagaaactctacatattattaatgaaaacccctatcaactcgccgctgaaatagatggaattagttttaatcgtgctgatcaggtggcacaaaaattaggaattgccacggatgattcacgccggattgatgcagcaattatccagacacttgatgacttgacaatggaaactggtgatacatttactacaacaaaacctcttctgcagcaaactatccaattgcttgcccaaggaagtggtggccgtgtttctacagatttaattgccaaccaaattgttgagttagagaaaaatcaagaaattagttacgcggatgaaaaaatttatccaactgccctttataacgcggaatggcaaattgctgatcacttacatcgtcttcttaccgttgaccaggaaaaattaccagcaacgactattgaaaaaacagttacggaagttgctgatcaatcggggataacctatgaccaagttcaaaaagaggctattaaaacagccttaaacagcaaagtcatgcttcttacgggaggcccaggaacgggaaaaacaacaattattaagggaattgtagctagctatgcgaaaattcataatctctcattggatgtaaatgaatataaggaaaagtcttttcctgttttgctagctgctcctacaggccgagctgctaaacgaatgagtgaagctacagatttgccagcaagtacaatccatcgcttgctaggacttaacggtcgggaaatgccaactgatatgaatgcccgcgatttagaaggctcgttattgattattgatgaaatgtcgatggtcgataccctcttgtttaagactcttattcaagccgtccctacttctatgcatgtggttttggtaggtgataaagaccaattaccatctgttggtcccgggcaaattttccatgatcttcttgactttgcagaactgcccaaagttgaactaaccaatattcaccgccaggctgctgattcaacaattatcccattagctcatgctatcaaagagggtaagttaccatcagatctaacgaataaaatgccagatcgatcatttatctcatgccatgctaaccaagtgccaagtgtggttcaacaaattattgacctttctaaaaaacgagattattccgcaaatgatattcaaatcttggcaccaatgtaccgcggacaggcgggaatcgaccgtttgaatgaacttgcacaacaggcatataatcctccagctaatggaaagcaagaagtcgattttaggggactaacttttcgtgttggagataaggttctgcaactcgttaatgttccagaaaagaacatttttaatggtgatattggaaaaatcacagcaattgaaagcggtaggacagtcggtaagaaaaatgaatcaattactgtcgattttgatggtaatgaagtgagctatagccgcatggaatggaatcaattacggttagcttattgtatttcgatccataaagcacagggaagtcagtttaagatggttcttttgccgattgttcagcagtttagccggatgcttcaacgaaatcttttatatacggcgattacccgtgccgcagaaaagttagtcttgatcggtgagccgtatgcggttgtgactagtgtaaaaaatgaagcagttaaccggaaaacttctttggtcgatcgtcttgataaggtttggagtaagcatggtgaactaaaatcaaaattggatcatcaaacggattcgttaaccaaagaactttctagtccgcaacctgttcaaaaagaaaatgaacagttaataaataatgatgctcagcaatatatcctaacagctgatctcattaattcagagacaattgatccattaatcggaatggaaaatattagcttacaaagtttgcatcaagccaaataatacttgcttgaatagtaatttgttgtcataatagttatgattattgtcgaactttaaaggagtataaaaatgacccagataaaaaatgccgataatgtgcgtttattttcactaaattcaaatccaaaactagctgaacaaattgctcaacgcgtggggattccgttgagtaaagcttccattagtcattttgctgatggggaaattaaaattacaattgacgaaagtattcgtggctgtgaggtctacgtcatccagtcagtttctgatccagttaacactaacttgatggaactattaattatggttgatgctctacggcgggcaagtgcggccaagattaacgtagtaatgccatactatggctatgcacgtcaagatcgaaaagcacgaagccgtgaaccaattacagctaaattgatcgccaaccttcttgaaatggatcaaattagtcgactagtaacgattgaccttcatgctcctcaagttcaaggtttctttgatattcctgttgatcatcttcaagcaaccagtctttttactaaatatattgaggaacaaaacttgggtgatgatattgtagtagttgcccctgatcatgctggcgttaatttagcgcggaaatatgctgaacgaattaaagcttccattgcgattattgataaccgtaacaatgaagttcgggaacggactgaacaagaagtaccggaatatgtaatcggggatgtaaaaggaaagactgcgattattgttgatgatattgtagatacaggagtacggatgaacttatctgcacaagcattaaagaactttggtgccgctaaagtttacggaattgctacgcatgcagtattatcagctgatgcggtaaatacgttacaaaattctcctcttgaaaaaatgattgtaacagatacaatccatctaccaaaagagaaagaattccctaagttggttcaattatcagtggacgatttattaaaagaagcaattgttcgtatccacaataaccaatcaattgatacattgtttaatcgtaaataaattaaaaatcgatgaaaattcagagttgaaactgaattttcatcgatttttatcttttaaatttttttagttttcaaattttaaggaaggtagtgaattaacaaaagccaaatatgctttgttttcatccatttcaacgctactgctttgaagctcatcaagattttcttggtgaattgttgactcctctacagtaataatatgagtaaacgtagcattaccgattagttcgacccagtagttgtagtcatcacggtgaagaattgtcttaaccatgccaccaggattataaacactaattggttcattaaatgatgctgcgtctggatgagtgagggctaaagcgagactagtggcagacatacctgtcccacaagcatttgtaaagccgactcctcgttcaaacgtttttacaaagagtttgttatgaccgagaatatggccaaaattaacatttaccccgtcactgaagtaaagattatcactatttaaccgtgtacctaattcttcaagtgctgggccatttagctcttccatactaacaaaactaattaagtgggggttaggaacagcaagggctgaaaaacggaggttaggatataactcagggacgagggtgtctaacaggcgctcatggccaagattatcaaatggcaaagcagtgcggtcaaactttactggtgaaatttcaaccgcaaaagcaggaactccaggtgcaaggtcttcatgctgacgaacacgaagactagcattcattgtatcaactttaaaatcggttaaattatcacgttctgctacataacgagcaaccgttctcaaaccattaccgcacattgaggcttcgctgccatctgcgttaattacccgcatttgtgctaccgatcctggtctagttggatggttaacaactaaaacgccatcagcaccaccgagaacgccattttgtgtatcagttacttttcgggtaaatgaaactagttctttatcggtaaggggagtagtcaattgtgtttggtcaagaataaaaaaggcattttgtgatccgtgtacttttaataattgcaccataaatagttcctcctaatttgcgaaaaagcgatggtaaatagctcgaacggcatcatccgcgtcttcgttgtatgttccgatcataattgcaattcgtgaagctccttgattaatcatgggaaccgcaatgtgtttttcggctagaggcattaatatatcatcaattacccccgtgcgattacgcataccttcaccaacaaccatggtaattgcataattatcaatccattctaaacggtcaggattaatctcctcttgaatttcattgcagatggtatcgattaattggtcattaattgcattccgatcaaggataattgttatatcatcgattccggaaggcatatgttcgtatgagacgttgtgctttgcgagaatttcaaggatccgaagagtaaaacctgcttgcttgttaagaagatatttgtgcaggtagagggctgcaaagtgttttccactcacgacccccgttataatatcgcttggttgaaaatctttatcagggacaatcattgttcccggcttttcaggatcattagtattacgaacattaattggaatatttccttgaatagcaggaatcaatgcttcatcgtgaaagacggagaaaccagcataagatagttctcgcatttcccggtaagtcatggttgtaattggttgcggatggtcgacaatttgtggattggctgagtaaatagcatcgacatcggtgaaattttcataagttgaagcgtgaagaccgcgcgcgagaattgcaccggtgatatcagaaccaccacgggaaaaagtagcaatgtgtccagcaagagttaggccatagaaaccagggaatactaataattcgttctcattaaacgtaaaatgactcaagtttgcatatgtttctggaataacgttagcattattgggtgttccagtaacgataataccagcttcacttggtgtcacaaaacgtgcttcatagcctaaatgctgcaaaaggatagccattagttgagcgtttaagcgttcaccatgagctttgaaagcggccaagagatagttatcatttggatacgtatggttaggaagaccttccagtcgttcaactagcggaattaatttatctgctggtaagccaaaataagcggcaatctcttgatatcgatttaaaatttgttcaacgatttcttggggattttggcctgcaattactgcttgggcatatttaatcagtaagtcagtaactttaatatcatcggcaaaacgtttacccggcgcagaagtgacaattacccggcgttgggggtcagaggtaataatattaattgcattttgaaaggcttctccattagccagagaacttccaccaaattttacaactttcatacttaaatactcctttgagaaaattagggttgttaatttatctctaaaataatttaatcgaattctaacacattaaggaagacatgcaaacctttaagttgtataaggtaagtaaaataaactttcttacatctaatggattaaaaaaactttttaaatttaattatttgtattgacattctcataaaagacttataagctatgtataaatcgaagaggcgcaaccgacactagtaaactaatttagtccgccaagacattgaggttagttgaacagggaagttgccgaagcgcttagtttggcacattaagtagctgggtcgtagttgaataagctacggactgtcgcaggacaataagagcctgcgttgcgctatcgacaaatcagaatggataagtgaattccactgtttgtttgcgcagacagtggattttttatagcctctttactacaaatctcatggaggaattacaaatgaacgaacagattactgatcaacaattaaatgccgctggtcatctaacgattgggggatgtgatgcggttgacttagctcatcggtttggtaccccgttagttgtttatgatgttcaacagattcgccaacagattcgagcatttaagcgggtttttgaagaaaataatgttgattatgcggttagctatgctagtaaagctttttcagcaatcgcaatgtatcaagtagttgctgcagaaggtgcgcatgttgatgttgtttctggtggtgaattatatacggcaatcaaagccggctttccaatggctgatgttagttttcacggaaacaataaatcacgggaagaattggaaatggcaattgaccatcacgtgggaacaatcatgattgataacttccatgagattgaattgctagcagacgttttggagaagcttgatgcacatgttgatgtaatgttgcgaattactcctggaatttctgctcatacaaataagtacattcaaactggtcaggttgacagtaagtttgggtttgaccttcaatcaggacaggcagatgaggcgttagcaaaagtcctcgagaatccccggatgcaaatgaaagggttgcatgcccatattggttcacagatttttgagcttgcgggatttgaaggggtagctaagaagttggttgaagttgctgcccactggcaagaaaaatttaactatcaagctgctgtgatcaatgttgggggcggttttggaattcgttatgtaaaagatgatacaccacttgctccagaagaatttgtggcagcaattattaaggtaattaaagctgaaattaaagaaacaaatcttgctatgccagcgatctggatagaacccggacgttcaatcgcggggcccgctggttataatctttatactgttggatcacgtaaagatgtaccagggttgaagccatatgtaacagttgatggggggatgggtgataacattcgtccagcactttatgaagcacaatatgaaacggtcttagcaaataatcctcgtgcagagttggttgaacatgttcgggtagcaggaaagtattgcgagtctggtgatatcctcagtcagaatcaggtattaccggctacaaaaccaggagatgtcttagcgatgcttgatactggtgcttatggttattcaatggcttcaaattataatcggaatcctcgtccagcagttgtctttgcagaaaaaggcacagctcaggttgtaattaaacgagaaacctatgatgatttaattcatttggatgaaccataccaacaataatttgacatatataaaggaagaaagaggtaaataattatggctgaattagatgcacaaacaatcattaactacattagtaacgcacccaagaagacaccggtaaaggtctatcttaaagggaatttgggtgatttagaatttcccacagaagtagaaacatttcttgaacagcgtacgggtgttattttcggtgattggacagttattgaaccgttattaaaggaatacagttcagcaattgaatcttaccatgtggaaaacgatgcgcgtaattcagcagtccctttgcttgatttgaaggatattaatgcccgcattgagccaggagcaattattcgcgataaagtgcttattggtgacaatgctgtcattatgatgggcgcaacaattaatattggtgctgaaattggtgccgattcgatgattgatatgggggcagttcttggtggccgtgcaattgttggtcgccactgtcatattggtgctggtactgtattagctggagtggttgaaccggcttcagctgaaccagtccgcattgatgacaatgtaatgattggcgccaatgcggtggtaattgaaggggttcatgtaggagaaggagcggtcattgctgctggcgccgtggttactcatgatgttgctcctcatacgatggttgcgggagttcctgctaagtttattaagaatgttgatgaccaaactgctggtaagactgaattagaggacgatttacggaagctttaggaggatgaagatgttaacagaagaagaattaattcaaattcgtcgtcatctccaccaaattccggaactagctctccatgaatttgacacccaccaatacttagtggagacggttgctagttttaaccaagcatttttagaagttcgtacttttaaggaattgccaactgctctcatggtgttagttcatggtcagaatccacaacgaacaattggatatcgaacagacattgatgctttaccagttgaggaacaaacaggcttgccatattcatcaactcatccgggaataatgcacgcctgtggtcatgatattcatatgacggttgcattaggggtattgaattattttagtgaacaccagccgcaagataatatcctgtttttcttccaaccggccgaagaaagcgaaaatggtggaaagcgggcatatgaactgggcttgtttagcggaaagtggaaaccagatgagttttacggtttgcatgataatcctgatttgccagcaggagcaattggttgtcggatggggaccttgtttgcgggaaccacggaagttaatattgacctcaatggtaagggcggtcacgcggcgtatcctcaaaatgctaatgatacggtcgttgcggcagcctcattaattcttcaagtgcagactgtgatttcgcggagtatcgatcctattcaaagtggtgtaattactttaggaaagattgacggcgggacgattcgaaatgttatcgctggacatacacggattgaaggaacgattcggggactaacgcagacgatgattgaaactattgatgaccgcttgaaggacgtatgtgaaggaatcgggcgtagttttaacatggatgtttcccttgaattaaatcagggtggctattggccagtagaaaataatccagaattaacaaaacggtttatccattatatggaagaaacaccaactgtaaactttatcgaaacagaaccagcaatgactggggaagactttggctacttactggctaaatttccgggaaccatgttttggcttggggttgaagatgattcacaattacattcggccacccttacccccaatgaaaaagcaattaaacgtggagtagatgcgattactggttttcttgaatatcggatgcaaaattaatagggaacaaataatggaggaaataatatgacattattacaaaatgcagacttaatgacggcaattgtaaccccttttgatgatgagggaaatattgactatggtcgtttagaatatttgacaaattacttaattgaacatgggagtaatggttttgttatcggggggactactggggaaactccagaactcactcatgatgaaaaaattgagctataccaacatttcggtgaaattgtaaacggacgggttccggttattgctggaactggtagcaataatactaaggaaacgattgcctttactaatgaggttgcgcaaattaacggtatcgattatgcccttgttgttgttcctccttataacaaacctaaccaacggggaatggttgctcatttcacagcagttgcggataatgttgacctcccaatcatcatttacaacattcctggtcgtacaggggtaaagatggctcaggaaaccgtagtagaattgtcgcaccatcaaaatatcgccgctgtaaaacaatgtacatctttggaagaacttgaatacattgttgaacaccgcgaccctgattttgcagttttcacgggtgaagatgcacaggcgctaactgcccgggttttaggagcaaatggggttatctcggttgcttcccatacctatgtcgatcaaatgcgccaaatgtatgactcactataccgaggcgattatcaaactgctggtaagttgcaacggtggttaactccccggatggccgctttgtttatgttcccatcaccatcaccagttaaagctgttttgaatgcgcaaggttttaacgttggtagttgtcgcttaccaattcttccattaaatgaagaagaaaaacgcgaattagagactgccttatcattacctactaattcgttgactgccaagaacttacctttaaatttgggggaataaagcatgaaaaaagttttaattgctggtgcgactggagcaatgggacaaaaggcggttgatctagtgaactcactcgctgggtttgaaattactgctgcgcttgcaccaaccttaacaaaagagaatatggctgattttcaccttgcatcatctgttcatccttatcaaactttggatgaaattgaagatggcgttgctgatatttggattgatttcaccttgccaagtgctgtttatcagaatgttaagtttgcgcttgaacacggaatgaggccgattgttggaacgaccggcttaaccgatgaacaacaagcagacctggtgcgcctcagtgaagaaaaacaagtgggtggattgatcgctgctaattttgggatgtcggcagttcttcttatgaaatttgctcaggaagcagctaaatatttcccggacgttgaaattattgaaatgcatcatggtgataaaaaagatgccccatcgggaacggctttgagtaccgcaaagttgatcgatcaagtccgtcctgcacatgagacgaatcctgatgagacagagagcttaaccggtgcgcggggtggcgactaccatggaattaagattcatgctgttcgacttccggggtacattgctcacgaacaagttctctttggtggggatggcgaggccctaactatccgccaagactcatttgaccgtcaatcctttatgaatggggttaaggttgctctggagaaagttgatggattatcaaaattggtaattggcttagaaaatattttataagagggtgaaaaaatgccaagactccatgctgaattagcaacaaccgtaaatagtcatctggcagctgttccgccagcacagattcgcgcatttgatgaagaaatttctgccgttcctggactagtaaaattaacgcttggggaaccggactttgctgtgccagatcatgttaagaaggcagcaattgaaagtattcaaaatgatgattctcactattcgtcgagcaagggtaagattgaattacgcaaagcgattagtaaatatcttgagcagagtcgtcacgtttactatgaccctgaaaccgaaattgtagtaacgattggggcaacagaagcggtaaccgcgacaacttttgcaatgttaaatccgggagataaagtaattattcccactccagcattttcgctatatttcccgagtgtttctctaactggtgctgaaccgatcaaagttaacactgctgaagatggcttcttgttatccgctgaaagactagaagaggtattagcaaaagagggtccggcagtaaaggctgttctcctaaattatcctaataatccaactggccgttcgtacactgaagaagagttaaaagcattggctaaagtaattgaagatcatcatatctatgcgattgttgatgagatttatagttcattgatgtacgatcaacccttccattcacttgcgacacttttgcccgagcagacaattctgattagtggtttatcaaaatcacatgcaatgacgggttatcgtttaggatatgtggctggcccaggagaatttatttcaacgatgtcaaagatgcattcatttatggtaacgtgcccaaatgatactgctcaagcggccgcgattgaagcgttagaaaacgggaatgatgatccgcaagaatttaagcgggcctatcgtcaacggagagataaacttgcgagtgcaatgagaaagatgggctttgaaattgcgttgccagatggcgcattttatatttttgctaaaatccctgcgcaatttgggaaggatgatctcgcttttgctcgtaaactagcccacgaagctaaagttggcgtaattcctggaaatgcatttggtcctggtggagaaggatacattcgcttatcatatgcagcggcagattctgttattgatacggcgattgaacggttacaaaattttatgaataatttaggataggttgaaagaaggaactaagatgagtaaagaatataatgtcgcaattttgggtgctactggtgcagttggtacacggatgattcagcaattggaacaatcaacaattccagtaaagagtgtgaaattactggcatctgctaagtcagctggtaaacaattatcatttaaaggccaaccgatcactgttgaagaaacgacacctgattcttttaatggggttgatattgtgctttcatctgctggtggatcagtatcaaaaaagttccttccagaagcagtaaaacggggagcagtttgtgttgataatacgagtgcttttcgaatggaacctgatgtaccgctagtagttccagaagtaaatgaagaggcgttaaaaaatcatcacggaatcattgctaaccctaactgttcgacaattcaaatggtggtagcattggaaccaatccgccaagcatttggattaaatcaaattattgtttcgacttaccaagcagcttcaggagcaggccaatcagccttaaatgaattacgacaagaaactcaagactaccttgatggtaaagatatgcaagcagatgccaagattttgccaacaaagggtgacaagaagcattatccattagcttttaatttattaccccagatcgatgtctttgaagatgatggttactcccatgaagaatggaagatgatccacgaaacaaagaagatcatgttaaacgacatggacgctaaggatattaaggttactgccacttgtgttcgtgtacctgtcccaattgctcatggagaatcgatttactttactgttgatgatccaacggtaactgttgaccaattgcgggcagtattaaaggacgctcccggggtagttctgcaggatgatcctgcgcaccaggtttatcctcaaccaattaatgctgttggcaagcgtgacacttttgttggtcgtctccgtgcagatgaagaaaatcctggttcctttaatatgtgggttgttgctgataatctccttaaaggggcggcttggaataccgttgaaaatgcagaacgtttagtcgcaaatgggttagtttaaaattttataatcataataaaaaatactctctgaatatagggagtattttttgtatggttataaagtttgtcgatagtaaaaagtaatgtagccaataaaaagttgaaataagtcttcagtatttttaggatctagttcaaaaagttttttaatgcgaagtaatcggttattaagtgtattacggtgtacaaataaattatgcgcagtttgatttacactcatattacacttaatgaactcacggattgtatcgatcaattctttcccatcttttctttttagtaaagcttcatattgatcattaactgctattaaatttaaatcactatctaatacctgtttaataaaagagacttgtgagtaatgcctaaatgatggctttccaaaaatattacttaatcgcagtgttgtaactgcttgctccgctaatctaccaagcaaattaccccaattactgataccgtattcaatttcttgatgttcaagtttttgttgaatatatgtttcttggtgctttgaactgaggataatcaactcaatgtgattagtaagagaaaaaataattgtttcctgatctagtttaaggtttttgattatctgagaactcccagcaattgcaattacaagtcgttgttttgctagatttatatttagacgatttgcttcctcaactagttcactatcaagttgcggattttgatacttgctgacattaatccacctataaataaatctttgtttaactttttcaatttcgtgctcttgttcattttcttgtttttgctgtagcaagagctcgactgctgtttttagcaatgatgctaggggagtaactttattagggtcaccagtaattccaacaacaccaataatttcatttttaaattttaagggcatattaacgcctggctgtccatgatttccatattgttgctccattggtagtgtttttcgctgttttatcgcatcaacagctccaacatgtaaagtatttatcctgcttttatttccacttgcaataatataacctttcttattcataatattaatgttatacggtatttgcgtcatcatatgatcgacaattgattgtgcaagttctggtttgagttccattattttctccttactgattggtaattagacgataagattttgataataggatttgtgtacaaaatgcataataatctttgtgcaaaacataacttgttataagcttgtttaaggattaatgtaaacgatgacaaagggatactgtttcttgtgatattttatcttattttaatatttctttactagcaatcaaagaggaggcttataaaatgatttcttggtggggagcattaataggattagcacttgcgatttttttaattttacgaaaattagatccagtatattcattattactaggtgcaatagtcggcgccgttattggtggggctggtttagaaggaactattaatattttggttaaaggtgaacaaagtgtaatgggaacggtccttcgagtattagcagcaggaatgttagctggtgttatgatggattctggggctgccgaaacccttgcacggacaatcgttaataaatttggtgatcggttagctatttttgcattagctctagcaacgatggtaattacagctgtgggtgtctttatcccagtcgctgttttaattgttgcaccaattgcccttgaagttggtcgcaatatgcatatttcaaaattatctttattggttgccttatctggtggaggcaaggcaggtaacataatctcaccaaatgcaaatacaattgcagcagcaaagggttttgggcttgaactaagtcaagtaatgattgctgattttattcctgccgtcatcgctttaatagttacagttgttgtagctagaatgatccgcaaaaaaggtagggcagttctagaacaagatcttgaagatagtgcaaaaacaatcaagcaaagtgatttgccgacatttaaacaagccatcgttgctcctgttattgcaatagttttacttttattaggaccaattggaactatttgtcatttaccattattagcaaaagtaaatttagatgctacctatgttttgccatttgcagcaataataggtgctctagcaatgggaaaaggtgaaaaaattaagagttatgctcagaccggtgttagtcgaatgactggcgtagtaatgattttaattggtgcaggtgcaattggtgctactattactgcgtctactttcccagagttattaatcgaacttattaaggcaagtcatgtgcctggtgtcttattagcaccactttctggtattctcatggccggagcaactgcttcaacctctacgggtgttattttagctactggttcttttgccaagtctattttaggatttggtgttgcaccacttgcagcggctgcaatggttcatactggggcgattgtcattgaccaattacctcaaggaaactatttccatgttacagcgaatgcaatgcatatggatattaaagaacgatcgcaaggtattttttatgaattcttagttggaggttccgcaatgttaaccgcaactatcttgtatggctttttgcatttactataaatgaaaggatgatcagtgatgaaatttgtaattgctccagattcatttaaaggcggactaacagcaaaagaagcagcaaatgtgatggcagaaggaattaaaagagtgtttccgaatgccgagtatgttttagttccaatggctgatggaggagaaggaactgttcaatccttagttgatgcgactaacggtcgaaaaatgattgctaaagtccacaacccattaaataaattagttaatgctgagtacggaatattaggtgatggggaaacagcagtgattgaaatggcagcggcaagtggccttcaatttgttaataaggagactgcgaacccgcttattacaactacatatggtaccggcgagttaattaaggatgctcttgaccataacataaaaaaaataattattggaattggtggaagtgcaaccgttgatggcggggcgggaatggcccaagcacttggagcacgtttactggatgctgataatcatgaaattggtttaggcggtggtgagttagcaagtttagagcaaatagattttggagacttagatcctcgcttaaaaaatgtagatattcagattgcatcagacgttaccaacccattaacaggaaaaaatggggccgccccagtatttggcccgcaaaaaggagctgatgacgaaatggtgaacatcttggacaaaaatcttcatcattatgcacgaaaaatagttgcagctggtgggccagacgttgaacaaacggcaggtgcaggggcagccggtggtttaggagccggattaatagcatttaccggtgcgacaatgaagcgaggagtagaattagtgattgaagcaactcaactacaaaaaaaggcagttggcgctgattatgtttttactggtgaaggaggaattgatttccagactaaatttggtaaaacgccatatggagtcgctaaggcaactaaagaggtggctcctaatgctccagtaattgtgttggctggaaatattggtaaaggtgtaaatgatctatattcatccacggccatcgatgcaatttttgcaactcctgaaggggctaaaccattaaaagcagcattagcagatgcacctattgatattgcgcaaacagcagaaaacgttgcgcgtttaattaaagtgagtcatgttaataattaggaattaaaagagggtggaaaaaactttgcttttttctcaccctctgctattttcacgaacaattgcaagataacgtagaattagcttcgcgttgtcacaaggctcgcgtccgagcgacaattagcccatacctccgccttagcttagccaaccgccttgtcgagaagactgttttctacgcacattttacagcaaattactggcttggcttagtcttataaagaccgtataatgaattggaagataaccaaggagaatttaaaaatggaagataataaatatcaatatgatgaaaacggctttcgtgaagatttaaaagatgatccagatgtcctccaccagccagatgctgaccgtacacagcgcgatttaataactctggactatgatgagacgttggcatttcttaatggtgaaaaggaagttaagactgtttatgacttttcagatgatgttttggaaaaaataaaagaaaaatatccaaccctaaatgatacaccgatcaataaagtaatcatggaaaaatatcagcagattttatccgctcgatacaatgaatcacaagcaaataataagacggtgcatgccgatgatagcgaggataatgatgaatagtctaataacgtttattatttcaattgcctttttaggattagtgatttgggaaaatcgtttacatagtcaacttggattcttggcaagtcaacgaccagataaagttacaaaggattttattcgggtagttcgtcaagaaaaacggttgaattggatcttgtgtatactagcaattattgttttcatgacgactagtcgttactcagttctattaatgagtattattacaattattgaattgttattagtaactcgtatggatcgtgtaaaaaatgaaatgatagattaaatattattataatgattaatcttttaagaaagagtaacgttttttaagaactatctaataattgctatacgcatttaaaaattaatggtaaagttagaattgtgtatttcactaatttattattgtttgtttagtttttaggaacttattgggagggtgttttatttatatgagtaaaaaaagaacacatcattcaaataaccatcgatctcgtggcgtttttgcaggagcagttagtgccttaagtttattagcagtgacaacacaagcagttaatgctgaacagcttactgttaagtctggtgacactatttgggggcttgcaaaacaacatggactttctattagtgcattagaacaaacaaatccttcagttaagaagataagtgatagcatcgacttaattacagttggtcaacaattaacgttgcctactactcaacatgatgctaacgcggatttgaatactgatggtagttatactgttaagcctggcgacacgcttagctctattgcagatcgttataatgtaactgttagtcaattaatgtcatggaataacttaagctctaatgattcattatacattggacaacaactcagtgtaacaggtcctgcgatctcaactgctgtaaacgcgcccgttgtaagtacccctgttgctgatgcgagtgtatcggctcagcaaccggctgctcaatcgacggacacaacttcattgatccaggttcaaacttcagcagttgcctctgcttctgtgcctcaacaagatgtggctagtagccaaccagcaggaacttcacaagcaactcctgctttgagtgcaacgcaacaagtttcaacttcttcaacagtagctgctcctaaccaaagtgcagccaacaatagtagtaccactattgcgaatagtacaacttcgacttctgctgctgtaacgtcctcagcaactactaatagtccagccattacaacagttgctgctcaacctgctacagctaataatgttcaggttgcttctgcctcagctgaaaatagtgttgcaccgcaaacacaaagttttgctgttagtcaagctacttcaacagctgtgaatactgctgctttatatggacaatcatttgttcaagcagcaccagtagcaagtcaagcttcacaatcacagactgcaccagcatcacaagcgacggataacgttcagaatagtaatgctgcttcgcaacaaacaactgttgtaacgtcacaagctcaaccgcaacaatcacaagcggctgctagtcaacctgcacagcaagcagcaactactaatcaagatttacaacatggttctgtagttagtcttgccactaagattgctaactctaatagtgttccatacgtatggggtggtgaaagtcttagtggaatggattgttctggattagttaagtatgtttatgctaatgcggaaggtaagcaattaccacactatacaggagcacttgaaaactgtgtggaccaacatccagttagtgaagctaagccaggcgatctcttattctggggtaaccatggttcaacttaccatacagctatttacacaggaaataatcaatatgtggccgctgctcacccagggactaatgtttcgacttacacaatcagtccatactttaatccaagttttgccggaacggttaaatagttctgatagattattagagctttttcattagatagtaacaaagatgtaacctaaaaagggttaacattcttctatcctcgtgttatcttacttatattgcaattccagtattgctctaaaaatatttcacatttattggggagtgttaaatatgagtaacaaacatgaaattgaagaagatttataccgtgcacagtcccgtttggatgatttatgtaaacaagagggacaggaaaatacgggcactcagactgttactattcaaccaaaatacggtgaagagatgcaatctttacgggaagaatgcagtcagttacggattattttagaagcaatggaagcttctgaagattaataaactaaaaaagattaacaaaaagcagtaagcgctagaagaaaaaattatcttctggacttactgcttttaacttatttttctgttgtttgccaaattggatattgactaatgtctagggtgaggtcgataaaacgattacctatttcttctccgtcagtttgactaaattctagtgaagtagttgtgatgtggagattatcgctttggaagtggtgggcaaattttgattgatctaaattgcctcgggctaattgcagcaattgccatattgtcataggccatcctttccgttcagcgacgactaattccaatgatggtttctttaacgaagcacttggggcaactttaaatccaccaccgataaatggatggttgctggtaattgcgatgtaagctttaggaaaaataaagcgttcacgcccagattgaatcatcagggtaaagggctcttgatcatagattactccaattgccttttggaggtaggtgaaacgcccaatatgatttttcttgtgacgagccttaaacgtattagcacgactaacaattgccgcgtcaaaaccaatccctaaattattaagaaaataaccttcttcaccccgaatcgcctcatgataatgaccaatgttaattttttgtggtgcgtctgcagttaaaatttgatttaatgccctttgtggatgcatagaaatcccgtaaccgcgggcaaaatcatttcctgtcccagcaggaatatatccaaccgcaagtggttttttattcaatcgcttggccgtcttcataagtccattaacaacttgatgtagcgtaccatcaccaccaatcgcaatgacaattgttgatcccgcattatgagattgggcgatttggctggcaaggtattctccatgattaggatacttagttgtttccatgtgataatcaatttgttgttgatctaagaccggtttaattgacgaccatgccttttctgcattaccattaccagcatgacggttgaggatgattgaataattcatcaatattcctcctttgaatggtgccaaaaagcaaaataatatttatattcgaataattaattcagtatttttctaatgttcataagaaagttggaggctgagaaaaacaagcgtttttctcagcctctgttaatgattaaaagcttagaacgtcgtcaacttaaagttagggttttgcttttcgtaagcaagggccttttcatcaagttgttctacaaattcaatattgtagtcagtgttgtgttcaaccattaaaagtgcttcagcttctgaatcagcttcaatatacaatgattgagtgttttcacgaactgggcgttttgtcttatcagcttggtagtatactttaaaagtcatactgttaaaaactccttaattaaagatattatgcagtaatttactttattattctatcacagataaccaaaagtgtcttaaattttcctaacatggtattattaaataaaggtaaaggccaacgaggtgatagtcatggttatattcttaatctgtattttagcagcaataattgttattgctctttatttaacgatccatcgcgtatttcttaagcgagcaacgatgatggtacagaaaaacgctcaagacgttactgatgcagcgttaaatactagtttgaaagaaatgttacattggaataaaaatctaaattctcaaattgttgccgatgtttggggaaaaggtgtgcttgcttttgaataccattttgattataaaaaagaaaatattaatcttgatgatttcacacgtcaaaaactagcagcagaacttaatgaatatgcaaaacgacaccatttaaagatggctcccaaagcctctcaaccgtttattataaccgattggtggaaatatgaggggattttgcatatcgatattgcctatttgataaatgaagcaactgttgagtacattgaagatttaaaaaaattaaatcaaaatagtaattagtgaaaatggccgggagaaagtgtatttttctctcgaccattttttgtaaaaattaactaatcattactgtatctgcaggcgcctcaaatggttgatctttattaatatgatcgtaaaatagcaccccatgcaaatggtcaatttcatgctgacaaacaattgctggataatgctttaatcgtaccttatgagtttcaccgttaacgtcttgataacgtaatgtgatgcggtcatgtcgtggtacgtagccaggcacgtctttatcaactgaaagacaaccttcgccttcagtaagagcaccatattgaaccgattcactaacgattactggattaatgataacgtccttaaataagggcttttcaccttcagcaggtgcgggaacaaggacagcagccatttgctttgaaacaccaacttgaggagcggcaaggccaactccagctcgtaacttgtacttttcacataattcaggatcttggcttacttctaagtattgcatcatatcctttgctaatttttggtcttcatcagataggggaaatgagaccttagcagctcgtttacgtaaaacgggattgccatcacgggtaatatctttcattaaatacattactcactatgcctccatataaaaattcagtcatattatagtctatcataactatttaaaattgctaatgaatatgaggataacaatatttaactataaattttgaaaaaacgtatacttcacttggaccattttaacaattctgtccattaagtttatgaaagcgcttgtattatttaggcaatcggttatactataaatgtaggtaagcaatcgcttacatgatgttaattggatttggaaaggaatgttgaatatggccaataccaaagctgtcaattttgctgagattaaagccaatgaaggggtaccttatgcaaaacccgtacaaattctggataacgacggaaatgttgttaacgaagaattaatggctaatttcaatgatgaattattagttgacttaatgaaaaaaatggtttgggcacgtgccttgcatgaacaaacaatgagtttttcaaagcaaggtcgattaggtttctatgcgccaacttggggtgaagaagcttctgaaatgggaacagctgctgcatttaagaagcaagacttccttttccctgcttatcgtgatttgccacaattaattcaacatggagcaactgttgctcaaatgtacttatggtcaaagggacacatcaaaggtaacctttttgatgcacgtgctctccggccacaaattattatcggagcgcagatggtcgaaatggctggtggtgctcttggaattaagaagaatggtgaaaaggacactgttgcctatgcttacactggtgaaggtggaagctcacaaggggatacttatgaaggaatgaactttgctggtgcattccaagtacctggtgtatttattattcaaaataatggatgggctatttcgttcccacgaaagctacaaactgaaacacaaacaattgcccaaaaggctgttgctgctggaattccaggtgtccaagttgatggaatggatgtccttgcatgttatgaagttgctaaagaggcacgtgaatttgctgctgctggtaatggaccagtgctaatcgaaacattaacataccggtttggtgctcacagttcagcaggtgatgatcctactcgttaccggactgaggatgaaacaaagccatggtttgataaagatccattgattcgtcttcgcaagtacctaacgaaaaaggggctttggtctgaagaagaagaacaaaaatatgctgatgaatgcaaacaaagctttaaagaagcaatgaaagaagcagactcagtagaacctgaaaaagttagcgatatgttgaagcggacgtttgaagtaccaactccagacattaaagaacaaattaagaagtacgaagaaaaggagtcgaagtaatcatggctaaaaagacttatatcaaagctattactgaaggtattgacatcgctttagccgaagatcctaagactttagtattcggtgaagatgttggtaaaaacggtggtgttttccgtgcgactaatgggcttcaagaaaaatacggtgttgatcgagtatttagtacccctcttgccgaatcaggtattttaggaatgtcaattggtttagcagtaactggctggcgtccagtaccagaaattcaattcatgggctttacttttgaagcaatggattctatcgctgctcaaatgtcacggatacgtttccaatacaatgggactaagcatgcaccaattactattcggactccttatggtggtggtactcatactgctgaactacacggggatgatcttgaaaacttcttcgttggtattccaggattacgggttgttgcaccaagttctgcctatgatgctaagggattaattatttctgcaattgaaaataacgatccagttctttttcttgaaaaccttcgtctctatcgttcagtcaaaggtgaagttcctgatgacaagtatactgttccgttggataaagcaaatgttgttcaagaaggtactgatgttacaattatcgcttatggtggtgaagtatcagaagcacaaaaagccgctaagaaattagctaaggacaatatttctgctgagattatcgacttacgttctctttacccacttgatactgacacgatctttgaatcaattaagaagacgcacagagtagtcattgttcaagaagcgcaaaagatggctggtgttggtgcccaagttgcatcagctatttcagaaggtgcaattatgtatcttgatgctcctgttacccgggttgctgctcctaactcagtatatccattcccacaagctgaaaatgtttggcttccaggtgcacgtgatattgaggatgccgtacgagaagtaattaattactaaaagtgcggaatagaaagggtgttaatacgatatggcatacatttttagactaccagaaatgggagaaggattaactgaaggtgatgttgcttcttggctcgttaaagaaggagaagcaattaaagctgatgatcctttaattgaaattcaaactgataaatcgactactcaattggtatccccagttgatggaactgtcaaaaaattatttgtaaaagaagacgaccacgttgaaaagggcgacaagctcgctgaaattgatgatggtaagcctggtattagtacaaacgtcgaaagcgaagacgacgatgatgaaactgatacaggcagtgaagaagctactgaaagtgaaaaatccacggctccagctgcagattctccttcagaagataattctccaaagggtggagtagctccacttgcagaaccaaacaagcttgtaatggcaatgccttctgttcgtcaatatgcccgtgataagggtgttgatatttcacttgttcaaccaagtggtaaccacggtcaagttcttaaagaagatattgataactttaatgggtcagctgctccagctaaggaagaaaagagtgcagctatgtcagctaagactgctccagttgcagctaagaccgctggtaatacaatcaagccatggaataccgaccttgaagaacgtgaaccaatgtctaatatgcggaagattatcgctaagactactcgtgaatcaaaggatatctcgccacatgttacatcatttgatgaagttgaagtatctgctctaatggctagtcgcaagaagtacaaggcagttgctgcagaacaagatattcacttgactttcttgccatacattattaaggctttagttgccacatgcaagaagttcccagaattaaatgcttcaattgatgattctactcaagaaattgtttacaagcactactataatgttgggatccttacaaacactgaccacggtctctataatccaaatattaagaatgcagattctaagagcatgtttgagattgcaaaagaaattaccgaaaatactcaagcggcctttgataacaagctaagtccggaatcaatggctggtcggactatcagtatcagtaatattggttcaattggcggtggctggttcacccctgttatcaaccaaccagatgttgccattcttggtgttggtcgaattgacaaggaaccatacgttaatgaagatggtgaaattgttgttggtcgaatgatgaagttatcattgacttacgatcaccgtttaattgatggtggacttgcacaacatgcattgaactacatgaacaagttattacatgatccagaattattgatgatggagggctagataatggctgatgttgaacaaaaggatacagtaattgttggtggaggtcctggtggttatgtagccgctattcgagcttcagaattaggtcaaaaggttaccttaattgataagggagaaccaggtttaggtggtgtttgtttaaatgttggatgtgtaccatctaaagcattaattgctgctggtcaccgttaccaagaaactttagactcatctatttatggtatttctaaaaccgatgcaaagctagactttactaagactcaagaatggaaggaccataaagttgtcgaccgtatgattcgtggagttaagatgcttttgaagaagcataaagttgaaatcattgatggagaggcaattcttgataatgaccaccaacttcgtgtaatcaagcctggtccaaagcaattcatggataatgataatggtcgtactatcacgtggaagaatttaattcttgcaacaggaagtcgtccagtagaaattcctcattttaagtttgaaggtcgtgttattgattcaaccggtggcttaaaccttaaggaagtaccagaagaattagttgtaattggtgggggctacattggtacagaattagctggtgcctatgctgatcttggtgctcatgtaacgattattgaaggtactgattcaattcttggtggatttgaccacgatatggttgatattgttgtcaagaatcttgaaaagaagggcgtagacattgtaactaaggcaatggctaaagattctcagcaagatgaaaatagcgttactgtcacttatgaagttgatggtagcgaaaagagcattaaagcagactactgcatggtatctgttggtcgtaaaccaaatactgatgattttgggcttgatatgacaaatgttaagttaaacgaccgtcatcaagtaattgttgatgaacaaggccggacgaatgtacctggtatttgggctattggagatattgttcctggtcctgcacttgctcacaaggcattctttgaagctaagactgccgctggtgccattgctggtaagaatactgctaacgattgggttggagtaccaatggtttgttttgctgatccagaattagctcaagttggtatgacggttgaagaagctaaagataaaggaattgatgtatctactgctcaattcccatttgccggtaatgcccgtgctgtttctcttgatgctgccgaaggatttattcgcttaatctacactaaagataagaaaaatgttattggtgctcaaggtgtcggtcctggtgttagtgaccttgctggtgaactttcattgattgtcaactgtggtatgaatgttgaagatgttgctttaacaattcacccacacccaacattgaatgaacctgttcaagaagctgcagatattgcgcttggcttcccaacacatatttaaattttaataagttagaaaagttcttagtgatggatgactcgattttgaaatcactaagaactttttctgtttggattcttttaggccttttattcctaaatttccgtttggattgtataatacaagtagaaaatgattggagggacaaaaaaatgaattcacataactatagttatccccttgatctatcatggacaactaaagagatggaaacggtaattgccatgtttagggcggttgaagatgcttatgaagttgcgattgatagagataaaattttagattgttatcgtgcctttaagcaagtcgttccctcaaaggctgaagagaaacaattgggtcgcgaatttgaaaagaattcgggttatgttctctaccgtgttgtcaaagcagcacaagagtcaacagataagcgaattaagatggttaggcaaaaaaatgattagtattgaagagttagatcaaaaagcacaacaaataattcgtcaagcaggtcaaaatgcataccagaaaatggaaaatgattaccagattgatacaaagacgaattatactgaccttgtaacgacaattgaccgggaaaatgaacaattaataaatgatcaactacgaaaaattgatcctgatagtcaaattttaagtgaagaaggatttggcgacaaacaaataagcaatatgcaaggacatgtttggattgttgatccgattgatggaacaatgaattttgttaagcagcataataattttgctgttatgttagcattgtatgttgacggtcaaccgatgcttggctatattttagatgtaattaataatcgtctttaccatggtcgaaagggtgctggtgtttatgttaacaaccaaaaaattggccagccagctgacttaggcttgcgagagagtttgttagcgatgaatcggacattaactttaagtggtgattcagcattaaagaaaatcgctcaagacgcaataggcttacggatgtatggaagtgcgggcattgaggtgattggtgtgatcactggtcaattaggtggatatatctctaatttgaagccatgggaccttgctgctgggcgaatgttagcagaagaattagacttagttgtgaaatcaattgacggtagttctattaatgtgttatcatctaatcttgtattagtagcaacgaggcaggttagtcgagatattcgacagatcatcaattagttgtcgaggctgtgaccgcgatgtcacagtttttttatgaaattggcgattgataggccgctgctgttcgacttaaaaatgatatgacgaaagggagaatcaagttttgaaaactcgtgacgacattcgtaacattgcgattattgcccacgttgaccacggtaagactaccttagttaacgaaatgttgaagcaatcagatactttaccagaacacttctcaattgaagatcgtgcgatggatactaacgctattgagcgtgaacgtggtattactattctttcaaaaaatactgctgttaaatatgataatcaccaaattaacatcttggatacaccaggacacgcggacttcggtggtgaagttgaacgtgttatgaagatggttgatggtgtattacttgttgtggatgctttcgaagggacaatgcctcagacacggttcgtccttaagaaggcccttgaacaacacttaacaccaattgttgtgattaacaaggttgaccgtaaaggtgctcgtcctgaagaagttgtggatgaagttcttgacctctttatcgaattaggtgcagatgaagatcaactcgacttcccagttgtttacacttcagcaatgaacggtacttcaagttatgattcagatgtttctactcaagaacacaccatgaagccattgtttgatactattatcaagacaatccctgctccagtagacaattctgatgaaccacttcaattccaagttgctatcttagattacaatgacttcgttggtcgaatcggtatcggtcgtgtcttccgtggtaagattaaggtcggcgataatgttaccttaatgaaacttgatggctcaaagaagaatttccgggttactaagctttttggtttcttcggtttgaagcggttggaaattaatgaagctgaagctggtgatttgattgcggtttctgggatggaagacatcaatgttggtgaaactgtagctgatgcagaacatcccgaagcaattactccattacggattgatccacctacattacaaatgactttccggactaacgattctccattcgctggtcgtgaaggtaaatttgttactgcccgtcagcttgaagatcgtttgaagcgtgaaatgcaaactgatgtgtccttaaaggttgaagatactgatgatccaggtgcatggactgtttctggtcgtggggaattacacctttctatcttgatcgaaacattacgtcgtgaaggatatgagttatctgtatcacgtccacaagttatttaccgtgaaattgatggagtaatgagtgaaccatttgaagaagttcaaatcgatactccagatgaatatactggtgcagttattgatagcctttctaaacgtaaaggtgaaatgaagaacatggaaccaggcgaaaatggtcaaactcgtcttatcttcttagcaccatcacgtggcttgattggatactcaactgaatttatgactatgacccgtggttacggaatcatgagccatacctttgaaaaatacgcaccagttatcaagaactggaaccctggtcgtcaaaagggtactcttgtgtccatgaatgctggtaaggctactacttacgcaatgatgggtatcgaaagtcgtggtcaattattaattgatccaggtacggaagtttacgaaggtatgatcgttggtgaaaacagtcgtgaaaatgatattactgttaacatcaccaagggtaagaacttaacgaacgttcgtgctgctggttctgatgaaatggctcacattaagacccctactcacttctcccttgaagaatcactcgaattcttaaatgaagatgaatactgtgaagtaactccagaaaatatccgtttacggaagaagacccttaacacaaatgcccgtgaaaaggaagctaagcgtcgtcgtgctgcttcacggaagtaaatatttaaaaaagcttgggaggctaactagctttccgagcttttttttgttgtataataatgattgtattttgtttttaggtaggtgcactttgtgaagaaaaagaaattaagattccgtaagattcgttctgtatggaataacgtccgctaccttgattattatattttagttccttaccttgctttatgtttagtaggaattgtaatggtctattcagctagtgcttccattgaaatgcaaaatggtggaaccccattaggatatttagtaaaacaaacaatctatgttgtaatgggagttgcggtaatggcatttatggcaaattatcctttgcggcattatcgaacgccaaggtttttacgagattcaacattggtagttggtgctttacttgtcattgttttggtttttagccgggctgttaacggagctaaaggttggatatccttgggcttctttaatattcaaccggtggaaatttgtaagctatattttatcttatatttagctgatcgaatggctaaaattaggcaacgtggacaacattttaccactgatgctaaaggtccttggctcataattgcagtttttctcgggttgattatgattcaaccagatattggaggaatggcgattaacggagcgattattgcaatcatgcttttagcggcggattataaatggggcgttggtttggaaataattcttgtcttaccagcgcttggctaccttggattggaacgactagttgaaagtggtttgcttcaaggcggtggataccaagttgcgcgttttgttgcctttctaaatccctttggaaatgctagtggttcaggaaatcaattagttaattcctattatgcaatcagcaatggtggtgtatttggggttggacttggaaatagtattcaaaaaatgggatatttgccagagcccaataccgactttattatgtcaattactagtgaagaattgggtctagtcggagtaacggcaattttagttactttactctttttgatctgtcgtattattcaagttggggtgcgggcagatagtttgtatcaaacgctcatctgttatggctcagcaacattctttacgattgaaacactctttaatattggtggagttctaggactcttgccgattacgggggttaccttcccatttattagttatgggggatcaagtatgttgattctttctgcaacggtaggcattataatgaatattagtatgcagcaaaatcgggatcgcttggttatggggaaaccatttattcctgaaacaggaggcgtaaagaatgtttaaattaattccacggcgttccctaataatttacattaacaataatcgtgtgattcgagctcttcgtcattatggtcagattgattatatttcccgacgaatgcattatgtggtaatgtatgtagaccaaagtgatgtcgaaaaaataaaagagaagataagtcgattacgcgcagtgaaaaaggttgaattatcagctcggccagatttagacccgacgttagctgatcttgaattaacaggggtctatcaattacatgatgaggatgataaaaaatgagaattgttgcaggagacttcgggggacgaaagctaagtgctgttccgggaatggcaactcgtccaacaactgataaagttaaagaagcattatttaatataatcggtccttactttaatggcggaaccagtctagatttgtttgccggaagcggtggattaagtattgaagctgtatcgcgcggaatcagtcaggcagtcttagttgatcgtcaatatcaagcaatcaaaacaattaagaagaatattgacgttacaaaacatgttgaacaatttaaagtttataaaatggacgctcacaaagcgttgaatttgtttgcaaaagacaaattgaaatttaacctggtctttttagatccgccctatgctaaacagcaaattgttaatgatatggagcagatggttaaaaataatttgctagctaaagatgcaataattgtggcagaaacagatcagaatgcgaaactgccgacagatttagctgagtttaactttattcgtcgtcaagaatatggaattacggttttaacaatttatcaatataaaggagaatcaaaataatgaaagttgcagtttttcctggatcatttgacccattaacacttggacatttagatttaattaagcgaggaagtgcgttgtttgatcaattggcagtggcggtaatgactaatgaaagtaaaaacccgctgtttactgttgaagaacgagtagcgcaaattaaagaggctgttagtgggctagataatgtttcggttattacaacggaaggcttaactgttgatctaatgaaccgcattggtgcagattacttaatgcgtggtttgcgtaatactactgattttcaatatgaacgtgatattgcggcgatgaataactttttagatgatcagtgtgagaccgtctttttccttgctaagcctgaatatcagcacttatctagtagtttgctgaaagaagtaacatcggctgggggagatatctcagcttaccttcccgctaatattaatgaagcactaaaaaagcgtttaatggaacgagaaatgttacgggttaagaaagacaatgaaaaagcaagataatgtaatattgcgacggataggaattattttagggcttgtccttttactaggctgctttttgttctggcccctaaattcttatattgaaagtccgggaacagctgctgatttacagtcttttgttaaaataaagggacaccccgatcgatataagggaagttttatgttgacgtcggtggcgattcaacgtgcccatcctgcaacatatttatatgccaaaatgatgccctatatgtcaattgagagtgcggaagatgtaactggtggtcaaaatagtgcaacgtatgaccgtgtccaaaaattttatatggatagctcgattaacgaggcaattgcagttgcttataatgccgctcaccaaaaagtaacgcgacgctatctaggaatttatgtattgcaagttcagcctaattctaaatttaaacatgatattcatgttggggacacaattacaaaagtagatggtcatcactttaataccgctcaaggctttcaaaaatatattggtgctaaaaaagttggcactccgttagtggttacttatactcgagatgggaaaactaaaactgtcacccatccgcttgttaaaattaccaatactaataagccaggaattgggatcattcttactaacaatatgcaagttaagactaaggttccagtaaaggttgatgctggtcaatatggcgggccatctggtggcttaatgttcagtttgcaaatatatcaacaaattagtggaaaagatttgcaacggggacgtaaaatcgctggaactggaacaataaattcagacgggaccgttggagaaattggtggaattgacaagaaagtaatcgctgcgcaccgtgcgggagccactattttctttgccccttatataaaaccaacgaaagagattcttaagtatgaagaaggtcatctgactaattatcaaatggctaaaaaagcagctaagaaatatgcaccaggaatgaaggttgtccctgtcacttcctttgacgaagcagtgaaatatttacaaacgcataagtaaattgaaaagcaagaggcaaaatgaaggtctcttgctttttttaatgcaaaatttattttttttcgtatttatatttatagggaggtgagaaacatgcagcaattatcagaattatggataaaatatcgagtacaagtgctgatgatagtgattgctgcagtagttgggggatattggatacttaataaaaataataacgatgctttaatttcaaatactaatgctgttttaacaagtagcgaaacaggaagtagtttaacttctaccactacgatgaaagggaccgttgcaattgatataaagggtgccgtaaaaatgcccggagtttatgaattgaaagcagatgatcgtgtgaacgaagccttgaaagcggcaggtggaccactacccaatgcagacttgcgccaagtaaatcttgctaaacaattaacagaccagcagatgatctatattcctcttcaaggcgaaacgccaatagtttccagcagtacagaaccatcagcagctaataatgaaaatggcagcgatagttctgcaaagataaatctaaacacggctaccaaagaacaactatgtcaaattacagggattggcgataaaaaagccgatttaatattgcaatatcgacaagaacacggtcaatttaagagtattgacgaacttaaagaaataaatggttttggcgaaaaaactgttgctaaactaaaagatcacctatctatctagtttttatttttttgatgaagatatttgctatactatatttcaaatatagaggagtgaaataatatgaaaccgagaattgattgggaccagtattttatgattcaagcagctttattggcgtcgcgaagtacctgcaaccgcctttcagtaggtgcagttttagttcgtgataagcgaataattgccggtgggtacaatggatcagttgctggcgatgcacattgtattgatgaaggctgctatttacgtgatggacattgtgtacgaactattcatgcagaaatgaatgctcttttacagtgtgctaagtttggtatttctgctgatggggcaagtatttatgtaacagattttccttgtttacaatgtaccaaaagtttattgcagactggaattaaggagataaattatattcgtaattatcacaatgatgattatgcaatgaaattacttaaactaaaaaatgttgcgcttcatcagattaaattagatagtgatattttagaagaggtcgatctggaccagtatatcaacccagatcaaaaatagattattcaacacttttggttttttcctgcgctaattgcaagtttagtagcggttagtttctttagttcatattggttaatttttcttttaattgctatattttaccgaattgccgtattaaaaaggccaatagtacttggagttggagtgctgatatgtttattgatggcgattttatgttacagtttacaaaaaaattggacaactattacggcgaataagcaaatggaagttactcaaaaaatattagtttaccctgatgaattaaaattcaatggaaattttatgacaggaactgcaatcgacattcaaactggacaacgtgaagcaataatgatgtcgtttaagtcaccccagatgctaaaaaatattgataagcttacaacaccctcgatatggcttattaatgggcaattaaaaccgattattccccgtacaaatgaaaatcaatttgataatttgacttataatcaccatcgccggatctgtaatcaagttcaaattaaccgggtagagcaaatggttaggcaaaaaagaggaatagttggctggtgtcatacattaagaaagcgaatcagcctctactttgaaactttaccgcctcctcttagtacgtattgccaacaattaataattggtagcagtaatgaggattcggctgaattaatggtaagtattaaaaggcttggtctgcttcatcttttttgcatttcaggaatgcatatcgtgcttttcactgatttattacggcggctgttagttcatttatggtggcgtaaagaatcaattgatttatttttaattatcattttaccgttttatcttctcgttggtggtggagcaacaagcttgataagagcaaccattatggctgagcttggtcttcttcatcgatatttaaatttggacagtcttgatggatgggcactgagcttattaattggattagttattgatccgttgctattgcttacattaggcggtcaattaagctatttgctttcttttattcttcaagttcttccagaatcagtacgtggttttaagcagtctttattattgaatttaattagtttgccttcgttattgagttatgtatatgaggttcatcttctgagttttggggttagttatttaataattccgctattttcgacagttgtttttccagcggtcttggttggggcacttagttttaagctttttgaaccactcgcgtatctaattaatgctggtttaaaatgttttcaatatattttaaattggttatctgattttccaggaatgattcattttgggaagccaccgttaattttggcccttctattatttgcggcatctttatttgttatttctcaagagacatctttaaaatcatggaagatattagccttattgtatgtaattactggagggataattcattttccacttaatggcgaagttacctttgttgatattggacagggggactcgataattattagagaaccttttaatcgacgggtaacaatgattgatacaggaggcaaattaaattttaaaaagccggattgggcgacttcaaagcattctcaagatgatgcccaacgaataaccattaattatttgaaaagtaaaggcatcaggcaaattgataatatttgtttaactcaccatgatgcagatcatatcggctatttaacaacgattttggataatatagcagtgaaaagactgattgtcccagcggggatggaaagacaaccagcacttcttaataaagtaaggactgctgaaaagtcatcgccaatgataattccggtgactgataatgttaagttgtcatcatttccattgcaaattctacatccttttgttccgggtgaagggaaaaatgaagattctttagtgttagctgggaaatttggtgggaaaagattcctttttactggggatttggaccaggaaaatgaagaaaaagttattcaaaagtatccgcaactaaagtcagatatcttaaaagctggtcatcatggcagtaaaactgctagtagttatttatttttgcagacagttgctcctaagtatgcgataatttcagctggacgatttaataggtatcgccatcctgatgaaataacaataaaaaattttcaaagattaaatattaattacttatcaacgcagcaatttggaatgatacaatatgtataccatggtcgaaatggaaaaataaaaacaacattgaggggagatgagacaagttggacattgcccaattatctacacaattaaaaactaaaaccccagcaatggtatatttaattttagggaaacaacaggtccttcaacagcaggcaattgatgcctttataagccttattccagagaatgaacaggttatgaatgttggtcgatatgatatggaagccacaccattggcagttgctttggatgatgcgatggcgactccattttttggtgaacgacgattagttattatcaataaaccgttcttcttaactggtgagaaaagacattcgaaagttgaacatgatttggatagcttaaaaaagtatcttgaacaccctgaaccgtctacaattttagtttttgcggccccttatgaaaagcttgatggacgaaaagggattgtaaagcaattaaagaagacagcagttttagttgatgctagtccacttgatgaacgagcagctcgtcaaagagtgagaactcaattatcaactgctggttttgaaatatcagaagctgctttggatgagttggttcaacggactaatgcggattatgggatgatggatgcaagcttaactaaattaaagattttggcttaccatgaaaaaaagattgatcaaaacatggtagccgctctagttccgcaatcattagatgaaaatgtatttgatttagtcactgcggttcttaagcataatcaaataaaggccttagatctctatcaacagctattagcgggccagcaaccgccgttaaggattaatgcagtgctagtagggcagtttcggctgttgattcaaataaaagtattaagtaaacgcggccttacgcaagggagtctagcgagtcagcttaatgtccatccttatcggattaaattgggattaaaaactgcgcgtgatttctcaatgcaggcgttagaaaacgcctatttgggattaattcgtattgaacaatcgttaaaaacgacacaacgcgatccttcacttttgtttcagttatttatgttacagtattctcagcagagcaaaggagcatgagatacaaaaagaggataagaaaatttgttttcttatcctctttttgcgaaaagttaaaaataaaaaagcaactaacttaatagttgcttttttattacttagcgtaacgtgctgagagacgtgacttgtcacgtgcagccttgttagccttgataaggcccttagagtgggcacggtcaattgctgagatagcagccttgtataagtcgtcaaggttatctgcgccagcaagctttgccttatcgaacttcttaatagcagtccgcatttggcttaattgtgaagcgttacgtgcttcagctttttcactagtacgaacacgttcaattgctgatttgataattggcatgagtttcacctccgttacccgattttcagttgaccagaattttcaacatttgtcattatacaaaagactagcgagcaatgcaatagctaacgacgatcaagtcaaaatttcatagaaatagttgcaacattagtaaattttatgtatatttgtataggttacttcaaacaagtaattaattgcctcttctcagtttaacgatcctcaccgacgttatacttagatcttaggcgcattaatattgaaaggtgggaaaatagcatggctatttcaaaagaacgtaaagatcaaattattaaggaattcgcaactcacgaaggagatactggttctactcaagttcaagttgctgttttaactgctgacatcaacgaattgaacgatcaccttcgtacacacaagcacgattatcattcacaacgtggtttaatgaagaagattggtcaccgtcgtaacttattagcttacttacgtcggactgatttacctgcttaccgtgaacttatccaaaagttaggtttacgtcggtaatattttattatcaaagcactttgccttctacttggaggcaaggtgttttttgtttttactccattattttcactgattgtggtaagatatttataactataatgaacgatataaaattcttatcgctacatattgtaatcgataaggggttcaaaactaaatattaaaggagccaaatcaatggataataatattaaaattattccttttggtggtgtacgcgaaaatggtaaaaatatgtacgccgttgagattgaagaccaaattttaattttggatacggggttaaagtatcctgagaatgaattaatgggaattgatgttgtcattcctgactgggaatatcttcgtgaacataagaacaagatagtcggggtattcttaacacacggacatgcagattcaattggagcactcccgtatttcttgatggactttaatgttccggtatttggaagcgagatgacgattgccttagcaaagctggcagttaaaaaccataaggaagttaagaagtttaatgattttcatgttgttgatgcgtcaacagcaattgattttaatgatgttacagtttcattcttccagacgacccatactattcctgaaactttaggggttgttttagaaactaaagcaggaaatattgtttacactggtgattttaaattcgatcagacagctaaaaagggttatcaaacagaccttgctcgtttagcggaaattggatcacaaggtgtattagcacttttaagtgattctgctggggccggaattacgggtgcgtctgctcgtgaacaagatattggagactatattaaagaaacttttaaatatcaaaacggtcggattattgttgctagtgtagcttcaaatattatgcgtgtacagcagattatcaatgctgctgtagccgttggccggaagattgttttatctggaaaagacattgaacaaattattgatacagcaatgtctttgggaaagttacacttaccagatgacttatttattagtcgcaaggaagcagaaaaactcgaaccaaaccaagttgttattttagaaactggtaaaatgggtgaaccgattaagtcattacagcaaattgcaaacggcgataatcctaatttacaattaacgagtacagatcttgtctttgttactactactccttcttatgcgcaggagactgaggtacaaaagacaaaagatatgatttatcgtacgggagcagaggttaaatttatttctgatgatttgaatccttctggacatgctaaccaaaatgatgaacaattaatgttgaatttcatgaaacccaagttcttcattccaattcaaggtgaataccgtctgttagatcgtcatgcggaattagcagaagaagtaggagttccaaaagaaaatatcttcctcgttaataagggtgatgttctgacttacaaaaatggtaaattccatgttggagaacatattgatgtaagtaatactatgattgacggaacaggtgtcggtgatatcggtaatattgttttacgagatcggcgcgtcctgtcagaggatgggatttttgttgtggtggcaactattgatcggaaaaagaaaaagatcgttgctcgaccacaaattacgtcacgaggattcgtgtttgtaaagactaaccgtcaactaatgcaacagagtgctgacttagttgaaaagattgttcaagaaaatctagatcaaaaggaatttgattggagtcacttgaaacaagatgttcgcgataaattaaaccgattcttgtttgatcaaactaaacggcatccagttattttgccagttattatggagattaatcaacatcaaaagaagattaaaaacaatgttgagaagaaagaagagaaatctgcgaagtcacgttcaacgaaagagcatcatcgtggtcgtggtaaaaaacgaatggcaaaagaaaagaagtagctgtttaatataagtaatgtgaagggaggctgggagaaaactttcgtttttctcccagcctcaactgcttttatgaacaattgtataaagtaatgaaataaaaaagggtgataaaaatgaacgaaccccaacaagatcaatatctccaggctcaaaaattaattgctgaagaaaaatggcaagaagctagtaatattctggaagatcttataaacgaggttgatgattcagaaatcggtcgattgacgataatcgctctgtatcattctcaacaatataccagggcttgtacttacttgtttgagtatttagaagtaatgtttgatagcttggcagatgctcaaattgccattaaaattttgtgtcaaaatgaattatttgttttagcaagacagatgattagtagtctttcgcaatggcaggaagatttgctgacaattgttacaatgggggaggaaaaatctcgtcaagagtaccaggagacattacaaacacgtttgcgagacttttatcatttaggagattactcccttgaagagcagcaaagtaggctgcaggcggcttttaaacttcctttaaatgaatttattacaggcgctaaattcctgcttcgtgatccctacactcatccactggtaaagtctagtttggttgagctgcttagtaagttacaagttgcagatccggttactgtttattggctagataagagagaatatacagttgtgccagctgatattcagcctttaaatttattgccagtcgttagtgaaggtaagagattaattacagaaaagtgtggaaatcaaaacccgcagacagaaaagatggcaattcaagaatttcaattacaggtaatgttcttatatccgcgaattaatcaaattattaaagatattgatgaatggacagatgttttaatcgctagaatagaaggaaagaaagtcgcaacaaatacggtttctagtacgtggcaggaacgactaggtaagcagattgacgaattaatagaaaaacattagtcaaatacatttacaaatgaacagatagttgatattatatttaagaattcttcttcagagcctaagattaaagctttcaattggcgaaaagaagttgtacaatatgtataaaggtatgtcagtcaccgaatcagatgatctggcattatacttgtaaattatcaggaggttttcattaatggctgaaaaagaacattatgaacgtacaaaaccccacgttaacattggtactattggccacgttgaccacgggaagactactttaactgctgctattacaaaggtattggcagccaaaggtttagcaaaggcagaagattacgctgatattgatgctgctccagaagaaaaggaacgtggtatcactatcaacactgcccacgttgaatacgaaactgaaaagcgtcactatgcacacatcgatgcccctggacacgctgactacgttaagaacatgatcactggtgctgcacaaatggatggtgctatccttgttgttgctgctactgatggtcctatgccacaaactcgtgaacacattcttcttgctcgtcaggttggtgttcaatatatcgttgtattcttgaacaagactgacttagttgacgatgatgaattagttgacttagttgaaatggaagttcgtgacttacttagcgaatacgatttccctggtgacgatgttccagttgttcgtggatctgctcttaaggcacttgaaggtgacccagaacaagaaaaagttatccttcacttgatggatgttattgatgactacatcccaactccaaagcgtcctactgacaagccattcatgatgcctgtcgaagacgtatttactatcactggtcgtggtactgttgcttctggtcgtattgaccgtggtactgttaaggtcggtgacgaagttgaaatcgttggtttaactgaagacgttcttaagtcaactgttactggtttggaaatgttccacaagactcttgatcttggtgaagccggggataacgttggtgtacttcttcgtggtatttcacacgaccaaatccaacgtggtcaagttttggctgaaccaggttcaatccaaactcacaagaacttcaagggtgaagtttacgttatgactaaggaagaagggggacgtcacactccattcttctcaaactaccgtccacaattctacttccacacaactgatgttactggtactatcgaattaccagatggtgtagaaatggttatgcctggtgataacgttacgttcactgttaacttacaaaagccagttgctcttgaaaagggtcttaagttcactattcgtgaaggtggacacactgttggtgccggtgttgtatccgacatcttagactaatttttgagtacagatgtgctgaaaggcttggggaaacccaagtctttttctttaacaaaaatatttgaaaataacttggggatcagccgtcaataagttgcaattactggtctcctacggtaaactaatatagtatgtaaagactagttataaatattaattagtcaaattgatttgttattggaggaaataaaatgtcagcaaaatgggaacgcgatagcgatgccagcaaaggtacattgacatttgaaattgatgtcgacactattaacaagggaattgacgaagctttcgttgagactcgtaaaaagatcactgttccgggcttccggaagggtcgtgtccctcgtcaaatctttaaccaaatgtacggtgaagaatcattgtatcaagatgccttaaacaaggtattacctgatgcatataacgaagcagtaaaggaaactaacattcaacctgtagatcaacctaagattgatattaagagcatggaaaagggtcaaccatgggtattaactgctgaagttgacgttatgccagaagttaaattaggtgaatacaagggtatggaagttcctgctcaagacaccactgttactgatgctgatgttgatgatgcacttgaaactaagcgtcaacaacaagctgaacttgtattaaaagaagataagccagccgaaaagggcgacactgtcgttattgattacaagggtagcgttgacggtgaagaatttgatggcggttcagctgaaaactactcactagaattaggttcaggctcatttattccaggttttgaagatcaattaatcggtcacaacgctgatgaagatgttgatgtaaatgttaccttcccagaagattaccacgctaagaatcttgctggcaaggatgcacttttcaaggttaagattcacgaaatcaaggaaaagcaattaccagaacttgacgatgatttcgctaaggatgttgacgaagatgttgatactttagctgaattaaaggaaaagactaagaagcaacttcaagaagaaaaggataaccaagctaaggctgctattgaagatgctgctatcaataaggctgttgctaatgcagaaatccaagatattccacaagcaatgttggatgatgacactaaccgtcaaatgcaacaatacttagcaggaatgcaacaacaaggtatcagtcctcaaatgtacttccaaattactggtacaaaggaagaagatttgaagaagcaatttgctaatgatgctgctcaacgtgtaaagactaaccttgtcttagaagcaattgttgacgatgctaacttagatgctactgatgaagaaattgctaaagaaatttctgaccttgcaaagcaatacggtatggaagaagatgctgttaagaaggcattatctaaagacatgttaatgcatgatattaagatccgtaaggctgttgacttagttgctgattcagcaaagcaagttaaggatgacgaaaagtctgacaagtaatttgttaaataattactaatcaatgaggctggaagaaaacagtagttttcttccagcctcgctattttaatcaaatattagtaagataaagtagaaaataatttactgagtaatttgtcgaaattaaacagtaattttgttattatgttttaataagtcttagaggaggttcatttatgtttgaagataccactggtatggattcagttcactgttcattttgtggaaagtcccaagatgaagtgaaaaaaattgttgctggtcctggcgtctatatttgtaacgaatgtgttgacctttgtaaacaaattattgatcaggaactagcagaagatgaagctaaaaaagctttccgtgtgccaactccaggagagattgttaacgaactggatgactatgtaatcggtcaaggtgatgctaaaaaaacattagcagttgctgtttataaccactataagcgggttaatgcaatgatgagtggcgataataatgatacagaacttcaaaagagcaacattgccgtaattggtccaactggttctgggaaaacctatcttgcccaatcacttgcgcgaattctaaatgttccgtttgcaattgcagatgctacaactttaactgaagctggatacgttggtgaagacgttgaaaatattatccttaaattacttcaggctgctgactttgatgtagaacgtgctgaaaaaggaatcatttacattgatgaaattgataaaatcgcaaagaagagtgaaaatgtatcaattacgcgtgatgtttctggagaaggggttcaacaagctcttttaaagattcttgaaggaacaattgctaatgtaccacctcagggaggacgtaagcatccacagcaagaatttatccaagttgatacgaagaatatcctctttattgttgggggagcctttgatggaatcgaaacaattgttaaggaacgactcggtgataagacaattggatttggaacagactcacgagaagctgaagaggttacggataaaaatattttgcaacatgttatcccagaagaccttcttaagtttggcttgattccagaatttattggacgattacctgtgatgactgctcttgaaaaacttgatgaagatgaccttgttcgaatccttactgagccaaagaatgcattagttaagcaatatcaagagttaattcgccttgatggaagtaagttgacctttactgatggtgcattacgagcaatggcacaactagcaatcaagcgaaatacaggtgctcgtggtctccgttcgattattgaagatgtaatgcgggatgtaatgtttgacttgccaagtcgtaaagatgtagaaaaggtaattattgataaacgatgtgtaacgcaacatacagaacctcgttacgttttaaaggatgaaaaagcttcttaatgaaatgaggtaagcaaatggaagttcacaatgtagatttaacaatcagtgccgtaagtgatgaacaatatcctaaaacaaatattccagaaattgctttagttggtcgttcaaatgttgggaagtcatcgttgacaaatgtcttaatcaaccggcgcaattttgctcatacgtctagtcagccaggtaaaacccagacattaaatttctatgacgttgaggataaggtatattttgtcgatgttccaggatatgggtatgccaaagtctcgaaaaaagagcgagaacgatttggaaaaatgatcgaacaatacttaacccaacgtgaacaattacgcggagttattcaattagttgatgcacggcatgaacccactcctgatgatgtaaatatgtataattggttacaatattataatattccaacattaatcgtagggacaaagattgataaggtaaaacgaagtgcatggaatcgccaactaagccttatcaaaaagacccttgatgttgagagttcaacaccgattattctattttcagctacagagaaaaggggtaaagatgatgtttggcagtggattgaagagcgaatggggaagaactaagttggattttaatgaataccaaaatgcagcaaaacgaaccttatatgggaatgaacaagttttaacaaattgtgcattaggattagctggtgagtcaggacaagtcgttgatttagtaaaaaactatacttttcgtagtcgaaaattagatcgtaaggaactaatccacgaaatgggtgatgtcttatggtatttatctcaaattgcagaatgggccgatattccatttgaagaggttgccaaagcaaatattgaggaattaaatcagcgctatccgactggttttaaaaagcaagattaaaaatagagagtggaaaatagccttctcgacaaagcagttggctaagctagggcgatgattagcacggcacgggctgattatcgttcgtacttagactcgagccttgtggcgacgcgaagttagttccacgttactattgttcataaaagtagtggaggctgggagaaaacaaaagttttctcccagcctcctttgcatgtgcgcccggcatgggtattagctaggcggtgagagtccgctatgggccgtagtagtcggaaccatgagctgaggacaagggtgtccactgcgaggtggaatctgaaggaagtctaaggcaaagtactgcaccgatgaacaagaagtagctataaggctggaactaactggataagactgcatgacaagttaaagtccaacactactcgaagttactttcagtaaagctaccggtgacatggtacgaaagttaatatccttacccggggagatctggcctacacgtttccgacaagaggaataagtttaatttccacagaaacaagcggtgcagtgatgtagcgttgagtaagccagaagtcagccgaggtcatagtagtctgagtaatcagatgaaggactgaacgacaataacttgtaacttatatcggaggtgtaatcaggtgcgacaatcgcagaaaacagaacaacaagctgaccgcttgtcgaggataggtttggaaaaccgaaagtacacaagggcgcgtagtaccgattatggtgaaggtaaaggtatgagtgtcactatccaagacttagtcttggaccgcaataaccttaatcaggcttatttgcgagttaagagaaataaaggggcagcaggcattgacgatatgacagtcaatgaccttctgccatatctcagagaaaataagacggaattgatcgctagtttgcgtgagggcaagtataaaccagcaccagtcaaacgggtagaaattccgaagcctaatggtggagtaagaaaactcggaataccaacagtggtggaccgaatggttcaacaagctgtggcccaaattcttacacctatctttgagcgtgttttctctgataatagttttggcttccgccctcaccgtggggctcacgacgctattgcaaaagtagtagatctttataatcaaggttatcgaagagttgtcgacttagacctaaaagcctattttgataatgttaatcatgacttgatgattaagtatcttcaacaatatattgatgacccatggacactaaggctcattcgtaagtttctaactagcggagtcttagaccatgggcttttcgctaagagtgaaaaaggaaccccacaaggagggccattgtcaccaatactggcgaatatctatctaaatgagttggataaagagttgactagacgtggtcaccactttgtgcgctatgcggatgattgtaacatttatgttaaaagtcaacgagccggagaacgagtaatgcgaagcattacccagtttcttgaaaagcgattgaaagttaaagtgaacccagataaaaccaaagtcggtagcccgctacggttaaagtttcttggcttttcgttgggtgtagaccacaatggagcctacgcccgtccagcaaaacaatcgcaacaacgagtaaagaaagcattgaggttattaactaaacgtaatcgtggaatatccctgacaagaatgtttgaagaaattcatcgaaaaatgcgtggatggcttcagtactactcaattgggaaactaactgactttattcaacgccttgacaagtggttgagggcccgaataagacagtatatctggaagcaatggaagaagcttaaaactaaggtaactaacttacagaagctggggctgtcccagcgtgatgcatatgtcttcgctagtacccgcaagggctactggcgaactgcacacagtaagaccttgagctattctctaactaatagaaaactggaacaactcggacttatgaatatgtccaagacgctccagtcaattcaatgtgattaagttgtcgaaccgccgtatacggaaccgtacgtacggtggtgtgagaggtcgataattgaactaatcaattatctcctactcgattatttcttttctttatccttgctatctttttcttttttatcgtcattttttttagttgcttttggttttttaggatcaaccgcaaattgatcaaataatttatcaagctgttcgcttcttctagtaactaatcccatttttttagctccttttttatatttgacaaaatgctagcataaattttgctaaatgtacaattatttctaaacactttctttgccttaatgatgatttttcagatataatatattgttagataatttttcggagggattttgcgatggccagtgaacatttagaacataaactagcattgttacctgacaagccaggttgctacctgatgaaaaacattaatgatcagataatttatgttggtaaagctaaaaatttaaaaaatcgggttcggtcttactttaagagtagccacaccggtaaagtagctaaaatggtttcagaagttgcggactttgaaaccattgtaacttcgactaataaggagtcgttcttacttgaaataacgcttattcaaaaacatcaaccttatttcaatatcaaattaaaaaagggaactggttatccctacataaaaataacaaatgagcgggatcctcaaattaagatcgttagtaaaataaaaaaagatggtggatattattttggcccttatccaaatgtctatgctgcggaggagacgatgcattttattcaaaaggtttatccattaagacgatgtaatgggtatcaaggccgtccgtgtttgtattaccatatgggacaatgtttaggagcttgttttaaagacgttcctaagagcgaatatgaagagcaaattaaaaaaattaagtcatttttaagtggaaatacagcgacagttaagcgacagttaaccaaaaagatgcaactagcagcagaaaacatggagtttgaacgagctgctgaaattcgagaccagcttcactatattgaagtgacagttgaaaaacaaaagattatttcaaatgataaaacccctcgtgatttatttaatttctatatggataaagggtggctttctattcaaattttctttattcggcaggcgcggttgatgaaacgagaaaaacgtctatttccaatcgtggatacggcagttgaagaaatgactagctttattctccagttttataatcgtcgcaataatattttgcctcgtgaaattcttcttcctaagggccttcccaataaagaaataagtgaaatattaggggtaccagttcggacaccggttcgtggtgaaaaacgggacctcttagcaatggcacatgaaaatgctcagttgtctttagatgaaaaatttcgactgcttgagatggaccaaagtaagactaccggtgcgatgaaagagattacggatgcccttggacttccagaaggtcaccggattgaagcgtttgatcattctcatattcagggggctgatcctgttagtgcaatggttgtatttgttaatggagaaccagctaaaaatttttaccggaagtataaattgaaaacggtgattaatcatgctgacgaagctgccagtacccgtgaagttattcgacggaggtattcgcgtctcttaaaagagaataagccaatgccggatatgatctttatggatggtggcgaaattcagatggatgcggctaaagatgttttagagaatgaacttggtctcgatattccggtagtagggatggtaaagaatgataaacaccaaaccgctgacttattgttcggggatgatgatcaccatattaatttgaatccacggagccaaggcttttacttagttcaacgcattcaagatgaggttcaccggtttgcaattactttccaccggcgcgttcataccaagcattcgttaagctcgcgtttggatgaaattaagggagtgggaccccgaactcgaacaaaattgcttaaaaaatatggatcaattaccaaaattgctcaagcctcagttgatgaaatccattcactaggaattaatcgacctaccgcccagttaatcaaggtttcattgcagaaaaatgctgaggttgctaagggtagtagtcatgattgagttttgacaggcttgtaaattttaaatatactaaataatagactaaagaacggagacaatcattatgaatatgtttgttgatcaaataaaaattgaagtacatgcaggtaagggtggcgatggaatggtagcatttcgtcgtgaaaagtatgttcctaacggtggccccgctggtggtgatggtggccgtggtggtagcatcattttaaaagttgatgaaggattacggactttaatggatttccgttatcatcgaatttttaaagctaaaaacggtggtaatggaatgagtaaacagatgactggtccaagtgcagaagatacaattattgctgttccccaaggtactaccgttagggaccttgataccggcgagattattggtgatcttgttgaaaaagaccaagaattagtagtggctaaaggtggccgtggtggtcgcggcaacattcactttgctagtgctaaaaaccctgctcctgaaattgctgaaaatggtgaaccaggagaagaccattacttagaattagaattaaagatgcttgctgatgtcggattaattgggttcccttctgttggaaagtcaactttattatcagtagtaaccggtgctaagcctaaaattgctgcatatgaatttacgacattaactcctaatctcggaatggtaatgctaccagatggccgtgattttgcgatggctgacatgcctggtttaattgaaggagcatcgaagggtatcggtcttggattgaagttcttacggcacattgaacgtacccgcgttcttcttcacctagtggatatgagtagtgaagatcctcatcaagcaattgaacgttaccggcaaattaataaggaacttgctaattacgatcctgaattattaaagcgaccacaaattgtagttgcgacaaagatggatttgccaaattctgccgataacttagctgcttttaaagctgatttggcagcagataagactttagaaaagcagccagagattttccctatttcagcggttactcatcaaggtgtccaacaattaatgcaattaacggctgatctcttagataagacacccgcatttgatagtgagagtcatgataaagaattggtcgctgaatatcgtgctgctgctcctgacaagaaggatgagacggactttaccattaccaaggatgaagacggcacctgggtattgggcggtgaaaaacttattcggttatttaagatgactgatttaactcatgaagaaagtcaattacgctttgctcgtcaacttcgccatatgggggttgatgacgcgttaagagctaaaggtgtacaagatggtgatcttgtaagaattgaaaaatttgtttttgaatttattcaataaaattatacgtagcaaaggtaggaaaaatataaatgcaacttgaatttttaggaacaggcgctggttccccaagtaagcaacgtaatgtagcaagtgttgcattgcggttgttagaagaacgaaacgcaatttggttatttgatgttggagaagctactcaacatcaaattctcaatacgacaattaggccacgaaagatagaaaaaatctttattactcacttgcatggtgatcatatctttggtttacctggtttactaagttcccgctcttttcaaggaggaaccgaaccattgacgatctatggaccaataggaataaagcggtatgttcagacttctttgcaagtaagtgagtcacgcctcagttatcctttgcattttgttgaaataacagatgacggggaactatttaatgatcatggttttagagtgattgcacgaaagttggatcacaaaattgcttgttttggataccggattgaagaagcggatcatccaggagaattacaagttgaaaaattacgagaacaaaaagtaccatctgggccaatttacggtcaactaaaagctggaaaaacggttactcttcctgatggtcgcgtattagatggtcatgactttattggcactcctcaacctggacgaattattgcaattttaggcgatactagacaaacaaagaatgcaattttgttagcacaaaatgcggatgtattagtgcatgaaagtacttttgctaaagatgagacgaagatggcatacaattattatcattcaaccagcaaacaagcagctgaaattgcaaaaaaagctggtgttaaaaaattattgttaaatcatatttcagcacgatacaccggtaaagcagcctatcaattggcatatcaagttcgtaatattattcctgatactcgagttgttaatgattttgatgtgattgatattccgtttaaaaaatgaaaagagatggcaaaaaatgctgagaagagtaaagacgttacgttttctgcgaaatgaagttgtattaattactggtggttcaagtggaatcggcaaagagttggcttttgaggcagctcgtcgtggtgcaattgttgttgttgtttctcgtaaccttgagaaattgcaagaggtagccaagaaatgtttaattttatctggtcggccagcatttgcttatcaattggatgtcaccgaccctgatcagattgatgatgtgctttcgaaggttcaacatgaagtaggaggaatcgatgtattaattaattctgctgggcttggtgactttattcccgtagttaaggaatcttacagctcaatggaaaaaatggtacatacgaacctcttagccttaatgtatattagtcggtgtgtagctaaacaaatgatggatcaagggtatggggccattattaatatgggttcattagctggtaaattacctacaccaaatagcgctgtatattcagcaacgaaggctggggtaatccagtttgataacgttttacgaatggaagttgctgattatggtgtccaagtgttgacaattaatcctggcccaattgatacacctttctttgataaagcggataataattatacgtatcgggcccatttaccaaaatggatatttatctctcctgaagacttagctcgacgaatttggaataatgttgggtataagacgagggaaattaatgttccaggatatgtggcttgtcttggctgggcttaccaagttattcccggtttaggtgactgggcaattaaaaaattttttgatttccaacaggataagaagaacttataatatgctcccttattttcgagagattacagaatttaatagtcttttcaaaaaatgaaaggggcaaaataaaagagactgagtttatcccagcctcttgtttaattttggcgttgaaatggtggttaattttaaatgattgatgcaaaatttaagtgggaacttgccgataatgcttcctcagcaactgttgataatcttgaaaaagagttaggcatttctagaatattggcaaccttattagctcagcaaggaatcgattcaaccgaacaagcaaaaaaattctttgaaccatcgatagaagagatccatgatccaaccttattgcatgatatggataaagcagttgagcgaattgagcaggcagttgaaaagcaagaacaaattactatttatggtgattatgatgccgatggaattactagcacatccttaatgtatgaaacgttattatctatcggtgccaatgttaattattatgtcccaaatcggtttacagatggatatgggcctaacatggacgcttaccaacgccttattgacaatggtacccagctttttattacggtggataatggcgttagcggaaaaaatgttatcgataaggtaatggaagcaggagtagatgttgtaattactgaccaccatgagttgcctgctgacttgcctaatgctgttgcgatcgttcaccctcgctatcctggtagtaattatccttttcctgatttgtcaggcgttggtgttgcatttaaggtggcctgggctttaactggtgagtttcctgttgaagaactggacttagttgcaattggtgaaatagctgatgtagtaaacgttatggacgaaaatcatgcgttaatttcctatggcattcagcaattacgacaggggatgcgtccaggattagcggctttaatgaaattagctgatattaaagctaacaatctaactgatcaggatattggatttggaattgcaccacggctaaatgcgcttggccgaattgctgatgctaatgatggagttaagctgctgacgagtttagatgagaatgaatcacaaaaattagctaaagaggtcgatcaggcgaataaagaacgtcagaacctagttgctgatattatgaaagaggcagaagaacaagctaatagttcagctaaccagcagaaaaagaccttattaattgttggaaaaggttggcatcaaggtgtattaggaattgttgccagccggattatgaatgagaccggaaagccaacaattgtcgcatcaactgatcaaaataatccgaccttaataaaaggatctggtagaagcgttgacagttttaatttgttcaatgccttggaggctcatcgtgaactatttacaacatttggtgggcaccctgctgcttgtggtctttcttttgatcagaaaaatattgtacctctgcaaatagccttggaagaagaagcagtcaaacaaaaatttgatccaacggtaaagcaacctcttccaatcgcaatgaaacttgtaccagctgatgttacccaacagttatataacgatattcaacgggttgctccatttggtccaggaaatatggaaccggtttttgaattaaataacgttaaagttgtcgatgtcaaaacaatgggacaggaacaccagcatttaaaattttcgattgtaagtgataaaaaaaatctaacagtcgttgcttttggtcaaggaaatttggcaacactattatccgcgccaaccggacaaattaatttagccgttaaagttagtcttaatgagtggcgtggtaaaaaaagtgtccaactgatgttagaagatctccaaattaatggaacggtaattattgatgaacgaacgaataaactaactcctcagctttttagttcttcagattattacattgtaagagagccaagattgcgagaaaatattgctccccatgtggctcctggctatactttatcgatcgaagaagcaattaagactgatttttctggtcaacaagtaacgctggttgactgcccatctagtgaagaaatgctaaaacggatttttgcagaggatgaagaagaaccagcaactattcgcttattactgtatcagcgaaaaagtgcctatttagctggactgccaacacggaatgattttgcacagctttatcgatttatttataagcaaaaagaattaaaatggcccatgcaagctaaagcagttagcaatcatttaaagattaatatggatcgattaaatctaatgattcaagtgttttctgaagcaggatttgttacaataaaagatgatgtgttaaagtttaatgagtcaactaataagactgatttaacgcaaactaaacgttatcaaaaacaattagcacaatataaagttgaacaacagttgcttttcaatgatgctgcaacggttgctaactggttattgaaatatttaaatttagaataaggagactatttatctcatggctttagacctttataaatacgtagctagtgttcctgattatccagaaaagggtattatctttcgagatattttgccattaatggctgatggggctgcctttaagcaagctactgacgaattagttgattatgctaaggataaaaaggtagatatggtagtaggaccagaagcgcgaggttttattgttgggtgtcctattgctcgcgaactgggtgttggatttgctccagcacgtaaaaagggtaagttgccaagaaaagcaattagtgcatcttatgacttagaatacggaacagctaccttgcaaatggaagccgatgcaattaaaccgggacaacgggttcttgttgtggatgatctcttagctacaggtggaacaatctctgcaacaattgatatggttgaacaaatgggtggtattgttgttggctgtgcattcttaatcgaattaaaagatcttcatggtcgcgataagcttaaagattacgatatgaaggcattaatggaattttaattaggaggaggctggggatactagccttttttctttttaaattatagttgtatatataaaatgaatgcgggacaataacattacgttgataaaaaggagccagttaatttatgattttcttagtaataatgggagccttatttttgattttgggtggtttttatcttgctaattcatggcaacagtatcgcgaatggaaaagcgggacaattattgtagtattgagtattatcgcaattgtttatggtgtgattaatttaccttattttcatcataataattctgctagctcaagccaaagtacttcatcttcacaagtggcgcggtccagtagtttttcatcattttcaaatggattagcgattggcaattcaagtgcaaatgaagcgcaacaagaaagtaagacaatggctgttttgcgtcaaatgcaaaagggttattcaaaattaggttcagttgattataacgaagatagtaagacattccagatcacgccaactgatgataatacggttgaagcattgaaagctttagcgcaagatccaagtcaggctgaacaaatgggctggcctaacttaactaagtcgattaaaagcaattcagggcaagtagaaaaagcattaggtgaaggatattcaattagtattatgaatccaagtgattctagtcaggcgttgtatacggccaaagatggcaaaactacatacgatattgctaatcaataaaactaaataacctaagattagttcaagacagattggggcacttaataggtgtccttttttgtgtaataaaaaagctgatatatcaacgttttaacaacgattgaatatcagcaaaactttagataaaggagacaaggggacttctaataatttgaaaaattctcctataatccttgatattaaagggttttaaaaatatttaattgaaatttgagaacattttgagaacattatactaaactatcggcgaacttgtcggcgattccttgttctggttcagtatctgcattaatataaacttcaagaacagtttccattgtatcgcctaatctatctgctattaattttggctgggtaccaatagaagccaaatgtgtagcatgggtatgacgtaatccatggaatgtaactttctttagattatttctaacaattactttatttaacggcttgtccaattctgcacctaaaacaattttatttttagtgtaggtagagaaaatcaattgctctttttggtgtggattaaaacctagtttagttaaaatatctatctgttgctgtttccatctttttagataggaagcagtttttttatctattgaaatccagcgataagagttagcggttttagggccaccaagatagggatgttttgcgttcttaatagccttgttaatatggattattccaccgctttttgtaaatttaacatcttgccacgtcaaggcttgaagttcttgttttctcatgccagtaaaaagggctaaccatagaaccatgaaagcacgaggatttttttcttcgtagtctttttttatacacttgataaaattgtgaagttgcttttcattaaagaaattattgttagtaaatgttttgtcatgttttttacgaggctttactacagaattcattggattagttgggatcgctcttaattgtactgcgtagtctaacattcgcttagtatagttaaaagggtcactctttactaattcttctttccatttagcagcaacttcagttaataactcaatgctaagatcagcaactttatagtttccaatgcggggtagaatatgatttttaatgatttgttttgttttatgaatagtagaattttctatcccagtctgttcatatactggcaaccatttttttgatagctcttcaacggtcatgttatggttattcatttgaccatattttttaagctccacagctttttcttgttcccacgctacagcgtccgattttaatttgaaacctcgcttactggttgatttaccattaatgcggtatttaacataccacgtaccatttcttttatccttgtatactgacatttttactttcctcctacaatcgcacagctggctggcaagagattgtagagaaaggtttaaaattatttttttaaaattttaaaatatccgttatcatttaaaaactgtgtaagtttttctttgaagggtggtaaatccttgcggaaagcaggatagcgatttgcctcttcgtcaataattaggcttaaatacgtatttgcaagtaattcaaattgttcattaatttgtttaaaatttatttcattggtaattggtacgccggtaagtaatccatctaatgtattccaaacaaattttttaagttgttcatgttctttgtcattgctagattcatctgggtacacaagataaccataattatcaagcaaaacagcagctaataaatgtctttttatgtcgtcacgccctaacccacgttcaataatacttctatcattttcaatatgagcagctttctttttgagagatacggaatcgagcgttgctaaatcatgaaaggtaatattgttgggaattccatagactagaaaatctagaggaacatctaatatttgaggtaaactgtgaaaaatcgaagcaggtataatccgctggccacgttcataattccccaaggctggttgtgatattccaatttttcttgctaagtctttttgagtcatctttttagctttacgaattagtgcaatgttagaacctattttctggtcagatgaaatttctttcacattaattcctccttgtatagttaatatattatacataaccgaaaataacaatacaaaacacaatatattttattttgttgttgcataatatttcattatgttatatattgtaattacgatatgaaataaagaggtgataataatgagtacagctattttagatcagttcattgatcagttagctgaagctgtggctaaaaagctagagaacaataagttacaagatgctaagactgttaaaaccgaaccagagtttatgaataagggccaaactgcggattatctaagtgtttctcgaacaactattgatcgttggattaagacccgaaattttccatcatcaaaggttggaggaaaatatgtatataaacgtgaagatgttgaccgttgggtaaaagaaaattctaagtaataatcgcacagctggctggcaagtgattgtagagaaataaataggaggaggtgagacatatgttacaaaaaattgatggtaagattttagcttactggtggacttcaccagaccaacgcctttgggcttatctagcaacgtttttaccattgctgggtattgttgttgcaattagtaacttattttaaggagtaataagaaatgagtttatacactaaaaaatttgaataagaaatattaagtaaaagaattattgatatagaagacaggattgttaaagctggcagttatataaattcaattactgaagattgttttgaaggtactatcactaaagaaaatggagaaataattgcagatgatccgatttcctcagcagatgaaattattaaggtcgctaaagaaattaaagatttagcaattcaatataaaactttaactgattttgaaaacgactttatggatggtaataaaaaagccgttgatagtgagaacgccaattcagacactaacaacgactaaataaaacttagagaattaaatttagctaataaaaaagccaacaatctttacgggggatgttggacgaattactaatatttaattctctttcattctaacatgagtggagggtttaaacaatggaaaaagataagaaccaagaactagcgtttgaaaatcagttgtgggaagcagattccaatgttgaagaaacaaccggaatagcccaagcactgtatgatcagttaaatgatgtttttgctccaattgtacgagtagacaattatgcagcaatgagtgatgaacaagtgtctacggttgctcaaacagtagtatcacgtaagaaagcattgttagcactatctagtattttgttggataagttagatcaaattcatgatcaattgcaataggtgggacgtgattaatagtgttaagttttgaagaaaaactatccgttaatcctttattagatagtgacaagatggaaaaaattattaattcaacgtcacatccccttaatgagtacgcaaagaaacagtttcagaaagcacttgaatactataacgatgattacaaggttatagaacgagctgttagtagtaaaagtagtagaaaatttattgctctttataaaaataatgaggaaataatttcctactacctaaataaatatcatagcgttaaacctgctattggtgcaatgtgtttttatcttctctactacacaggggatgacgttaaacaagttaaccgaatactgcaccgtacaccactctttaagtattggaataatgctagtcaaaacgaagatcaatcaatagtcgattgggacaatatatacgaagaaacaagtttagacgggaaaagctttgaatatatcaaaacaaaaggcgaagtagagattatcagtcttaaatacaaacgctaaattaccatgtaaagagaggaaaaatatggctaatattgatgacttagtaaataacaatagttttccagaatggttaactgtaagtgataaaggaaataaactggttgatgaaattaagttggctaaatatttagaaaaaaagtatcactttacatccaaccaatttatagaacacggctattggttcgatcctaaaagtagacaatggaaaaattacgctgattcagtcattgaaaaatcaatcaaaaatgaaattgtacctcatggaatatggagaacgaacttattagcatcggtttctaaattaattgccttagattcacaagaaattgtagaagacaatccatttgatcaaccagcaccttataaagcagtgtttggtaaacacacttacaacttgatgacggacactttagaagataattcaccagagaactatcttttacaaaatagaccatatgaattagaaacaaaaggaaaagctacaacgtggaataaatggttaaaacaatcattagtaccctcaactaaagaaatccgtgatgatactggaaaactacaagatgaatatgacctaacagcaattgaaacagtaaaagcctttattggttttgctttagcaggtagttttaaggactttcaaatttatatgattctatacgggttgggtggggatggtaaatctacatttctaaataaactaatggagttaatagggaagcctaacgtttcaaacgtttctttagaagcattatccgaccaaaaagaagctaaatttgctacttctcagctgtatcataaagctgctaatgtttttgctgatataagccccaaatttatggaacagactaatattattaaaacattaactggtgacgacactacaacagctcaatttaaatataaagatccatttaaacttgaaaatgaagctaaattgatttttagcgctaatgatttaccagccttcaatgattttacagacggatttaaaagacgaccaattattgtaacgttccataagattaaacattttaaagagcaattcaaagagcaagactttaaaagagaaatgccagcatttgcctatgaatgcttaaaatcttataaaaaagcacttgattctggtaagtttccagtgactgaatacatggaacagcaaaagcgaagctgggtaaatgctaatgacaatatcggtaattggattaatgattgctgtactacaaatgagaaagataaagaaaaatcagtatatctatatgataattacaaagagtattgtaaaaatactgctgttccttgtcttagtaatcgtaagtttgcgaaagagctaatagcacgaggatacaaacacactacagttaagattaacggtaaaaatgttaaaggttataaaggaattgctcttaaaaattagttatagttttatatttatcggttacctttgcagaagttcttataaagcttgatataaagctatttaaaggtaaccgaaagcattttgaggtaaccgatagtttcgggttactatattaagtaactgcaatgtatcggttacctttatatcctatcggttaccatataaatgttgatataaaggcgattgtgggtacttgaaacggggtaaccgataaaagtaaaaactattttcaattgaagagatgaaaattaacaattaaaactgcttttaccgtacttttattttgaggcagtgaccacataccaccggataggtgaaaagcctattaaggagttaaaaataaagtaacagtagatttcactagaacggctgcaaacgttctactattgcttgtatctgcaagtacaggcagaaaggaataattaaatgcgaagtaataaatacgcaattacacgattaaagcataaggtcacattcggtcatgaaggtggtacggggaaacgtaacccgaatactggtatgatcatgacaggttttgtaggagatgtgacagtacattgtggtaactattcaatcagtgctagtcaagctattagtgaggcaggtagttcaattactgatgatgttatattggtagttcgtcacaagaaagatttaacggacatgaagaaatatccagaagcacaatacaatggcagtatctataaagttgctggttggtcaattgatgatgagttattggcgtatgatattgtaaccttacgcaagcttgatagtcataaataagaggtgaaatggggatgagtaaattaacagtcaacacgcacccagagtataacaactttattaatgtaatgattgaggcaagcggtgatgatccttctaattatcatatgtatactacgctttatagtttaaaattagtctcagtaaatggcagtccattaccattagcgattgatctaggactaccagacaaccaagagctagtaaagtgtattgcacaagtggcagtatgcaaggacgcagaggaaagtcgccaagactgggtgatgatggcaaggtatagactaagcgagtgtgacccttacagcgccgatacaatggagcttgaagcttgcattaagagaacggttaacgatgttaaaagctggcacataagcaggcttgaagcatatagtaaggcaatggaattaattaataagtaagtgctaagggtgtcgtgttatgcgatgcccttttttcataggaggttatcaaatgagtgtagtaaggttttgtagtgctgctggttgtcgagaggtgattccagtaggtcaatatttttgtaaaaaacatcaatatctacaaaaagaatatgaagacaagcgtaaacattggcaacgagataactataaaaagatgaccaaagaacagaaacatgaatacaatagaaaagtatacaaaaagcgaatggaaagaagcgccaaagctcctcatgactataatagattctacaaaacgagtaagtgggttaaattaagccgtcaaacgctccagaaaagcccagtttgtgttatgtgtttacgaaagggaatagtaaaaaaagctgatttagttgaccacattgtacctatacgtgaagattggagtaaaagattggattcaactaatctacaatcactttgctatcgttgtcaccgagaaaagacaagaaaagatcatcaacgagaaaggaaaataaatatgaatagctgaaataattttaatacccccgctattggtatagaccggtaggagccgtaatggtgggggtttcttttaaaaaaattctccctttacaaaaaaacgccttaaaatccgaagatttcaagacgtttctttttattttgtatggttttcttttcaactttattaaataatttagagcctcaaatgtcaaggattttttattataacttttaggcattgaacttaacaaactattcaaatatggtataataagggttaaataatacgataattgaatatgaaatgatgttttttttatttttttaaacaaatagtgacatggtgtcaccaaataaatagaaggaggttaaatagttggctcaaccaatgaagacccgtccagaaggtcatattactaaggcagaaaaagcacaacgtgaagacgctgaaaaagcattggcagaatacccaaacttaacatctcacgcccctaaatggcttgatgatgtagcaaaaaaggaatggcgtagaattgtcccactcttaaagaagagtgcccctattagcgaactagatgttagtttaatcgctactcactgtactttgtattcaacaattatcaaatgtactaaagagattgatcgtactggggtagttattgatacaaaacgaggattacagcagtcaccttactacatggcacgtgataaggctattaaagaaatgaagtcaattgatagtcaaatggcacttagcccacaatcacgggtacgcctagaagtccacaaggcaatgagtgaagaagctcctactgatgagtttgaagagatgttgtcataatggatagagctattcagtatgctaattcagttgttaaaggtgagttaatcgccggtaagttagttattcatgcttgccagcgcttcttagacgacatgaaaaagcaaaagaccgatgactttccttattattattctgaaacgtatgctggtaaggttattaaatttgttgagagcttaccacaaacaaacggtgaaccattgaagctagagccatttgaagtgtttatcttatctaatatctatggttggcgacaggtagacgataattcattgcgcttcaatcggattctattaagtgaagcccgtaaaaatggaaagagcttcttactggcagcgattggcgttgtgtctcttcttatggaaaagcaaccagcccgtaatcgacaaatactatttactgctaacagttcccagcaggcacaccttgcgtttgatattatgagtgaccaactagaaaacttacggcgtaattcaaagtatttaaggcaacgagtgaaaatcaataaacaacgggtgactgacaaaaagacaggtagcttcgcaattccactatctactgatacccacagtacggacggttataacccgacactgggcgtagtcgatgaatatcaccaagctaaagataacactattctaaacgccttgaattcaggtatggctcaacaagacaatggtattctagcgattatttctactgctggttttaatcttaattcacccttcaaaaatgaatgggactatgcagccgatatactcaacggcaaaattaagaatgatcgttactttgcggttatgtattgtcttgataaaaaagaagaaatattcgaccccacaatgtggattaaagctaatcctttgatgagtaatcctaagattgctaagacaatgagggaacacattcaaaatgatttagatgtagccacaaaacaaaataatattaataacgtacttgtaaagaatatgaatatgtttgtacagcagaatgaaaattcatatattagtacgcaagattgggaacatggattgattgaaaaagctccagatattagtaatagagatgtttatattggtgctgatctatcaaaaagccgagatttaacggcgattagttggttagttccgttagaagatggaaagttttacgctgattcccacgcctttgtatctcgttatggtggaattgttactaaatcaaaacgtgatggaattgattatgaaatggctgctaaacgtggagaatgttcaatcagttcattagaaagtggcttgattgattatgattccgtatatgatttcgtgatggacctaatcggtaagtataatctaaatgttaaattcttagtatttgacccttataaatgggctgatcttgttaatcgttttgaacgggcaggactaccacaacttcaattaacacaatcctataagaatttatcggtaccaattgggacttttaaggaagaattaattgctggtaacattcttcacactaacaatcagatgttagcttacaacgtaggaaatgcaatattgaaatataactttaatggtcaagcgttattagacaagactagaaagcaaaataaaatagattgccttgctgctcttatggatgcttgggcggctggttatgattacttcactaagagaaaggagcaagaacgtacaaatgaatactatgaaactgctaaaaatcttttctagctatattaaaccggttttgttgatcaccggaggcgttctaatggagatcagtgctataggattaaccggttggttgtttgggattggctttcttggtattgaaatgattgttctagctttcatgattaactattctgataatcacaagtaaaggagggtagataatgggcctatttagtaagagaacaacgactacaagcgcacaagacccctttctagacgctctagtaagtctttctagtaatgaccctaatagttacgttagtgcttcggctttacgtaatagtgatatatttgctgcaattagttctatcgctggtgatcttgccagtaatccgattaagtctagttctagcctatataacaagatgattaatgatcatcctaacgagttaatggacggcagaagtttcaagtacgccctagcggttgaaatgctattaaatggtaatgcgtttgccgaaattgatttaagttcacacacgctaaattttattcctaacaataaattaactgtccagcaagatgatgtaacgcaaaagctgacttacacatacagcccagatggacgtattaagcgagtaattgcctcttctaacatcttacattttaagtattttacccgtgatggtttagtcggactatcgccactgtatgcgctaaaagatgaaatgaagatacaggcggctggaaacaggttaatgactggattctttaataatggaattcatggcacaacagttgtccaagtccaccaagctgatcttagttcggatggtaaagagaacattagaaaacaatttgatgaggcaactaccggcaataattcacttaacacaattgttactgatgatggtatggacgttaaaagcctaccacttaatacagacgtgttaaagctagtaaattctaatgactggaatacccgtcaaattgcgaaagcgttcggactaccacccgagcgtttaggtgtagaaaacgagcatagcaaccaacaacaaagtaacgttcagtatttacaaggtactttacagcactatgaagattgctttacttctgaattgaactacaagctagggcaagattttagctttgataatagcaagctattaagccttgacccgtccgctcaacagcagatggcagttgatggttatgttaacggtatctacacacgcaatgaagcccgagccttacttaatttagtgccggtaactaatggagataattttattgaaaaagaaggaggagttacagccaatggagaaacgactaacaactaacgcaggtttacaaacggtaagccctaaagaagacccaacaaaagaccagcaagataaccaagatgaaacgcaagcctcacagcctaatacagttgaaggctatgcgttactctttaatcaacccagcaaggacttaggcggttttgttgaagtgattgaccctagcgcccttgataacgtagacctatccaatgtagttatgcttgatcaacacgactacactaagccactagcaagcgttaaggctggttcattacaacttgatgtggacgataaggggcttcacttcaaggcaactattgacccaagtgtaagttacgcaagtgacactcttaataatgttaagaatgggaacattaattctatgtctttccgttttgatgttgatgatggttctgacagttggacacgtgacgacaacggacaaattacacgcaccgttaatcagattaaagatttatttgaggtttcaaccgttacagtgccttcatatgatcagacaaatgttgatgtagataaaacaagcattcgtagttacaaccaatttatcgaaagtgaggaacataataaaatgcaacacacaatcttagaccccaaaaacaatacagaacaaccagctaacgcctttgaaagcttcattcgttcacgtggtgaaacccgtgacggattaacaactaagggggcagaagccgttattccagaagaagttgttactccagtcctagacttaaagaacagtgcttataacttagcaaagtacgctactgtaaagactgtagggactggttccggtcattatccaatcgctacccgttacaacacagcggtacttactactaaggaagaacaagcagaaattgctgatgtagacgctaatatgtttgaagatgtgaagtttgatgtaaagacccgtgccggtaagattgcactatcaaatgaagttgttgacgattcagaagttgatattgtatctgaagtaaagaaccaacttcaaaagttagttgataacactgataacgctgaaattatcaaggtattacaaggcgataactttactaagaaaaccgtagctaatgttgacgacttgaagcaagtattcaacgttgaccttgacccagccttacaaagtacttctacatggttagtaaatcaatcagctttccaagtattagatactttgaaagacaatgaaggacgttacttattacaaccagatgtaaccgctcctagtggattttctttacttggccaacccgttgttaagattagtaataagttcttaccagataacacagacggttcacatccaatgattttaggtgatatttcagaagcggtagcagtattccggcgtaatcaagttacagcccaatgggacaagttcgacagttacagtcaaggtttatctgttatcgtccgtaatgactaccaaccaattagtaatgacgctgcttttaatctctctttaaccacaactaaggcgaccgaaagtaaataatagctactagcacagggtgggcaatatcgcccactctttttttatgaggtgtattaatgcgaaaagaagtaaaaagtctagtaatagtaatactgaaagattatccttcaattaataagaaactaaaaagccgtaagtttgaactaatgcaccctatccgcaaaagagatgaaaatgtaggtggtggacgtgctatcaatcgaccatggacttattacgatgatatgttaataaccattgaccaagatagatatatgcaccgcttaaaacgtgagaaagaagctattgacttagcattacaagacgctggggactgtacccagaagataattaaagaatgctattttaaccctaatcataagacgataaagaacctagtagcaactggcgatatatggtgtagcactacaaaagcgtacaagttacgtgatcaatttatagtagatgttgctaaaaagttagacctagatgtgttctaaaagaaggtgaaattaatgaaatttgatgtagagcagtgggaagtagacaactttaagcaagccttatatcttgacggtgaagaagaagaccaattaatcaaggattatctaaagaacgctaaggcttatgtacaaaacgctgtaaaccccacagcagacttaacccagtatgaacaatatacgttcgctgttcagatgttggcgcaattttggtatcaaaatagaggtattgacatgtcaaataccccttaccaagtgttaagcatgattcaacaattgcgggcgcttgtatagataactagtatagattgatgcgttatatacctaaaatgtatggtataattaatagcgggaagtgagtaaaacttcccgtgaacattaagtgtttggagcaatacagccagcattacagtatttattttctttcaagccttgtaaactccttccagaatatagctatcaaagtcaccatagtagaaagctttattcaattggaaaggggatggttatatggaaataaagtataaccgttttcttgtcgcttagttaagcgataggaagtataaagtcgtgacggacaagaatacaacggcttctttgatgtgtggactgactaatgttattgtttggttggcactcaatgtccacaacatggcataccttgtagagtgtgggttaaagtctttaatggctttcttatttttaatttggtagaataaatatccatattttccttagtcgggctttaattagtccggctttttttgctctcaaacgaaatgaaaaatcactagacgggtaattgatcatcttattttgttagagaaggaattaaaccaagggtagtgtttccagaaatcgagaaaactttttttgtgatgataaataaaaaacgccacgtaaattgtgacgattggaatatgtatttaaataagtagatatgtatcttgccagccagaagatattgagaacattttgagaacaaaaagtgatatatgttgaaatgttgtgataaattaaagggctgttaaaccgctatataaagcaatttgaacaaccctttaacattctgattaattatctaaggagacaaggggatttgaacccctgcacgcttttacacgcctaacggttttcgaaaccgtcctcttcagccacttgagtatgtctccatttcaactatattattgtaacaaaaaaattgtaaagcgtaaagagaatatcaatcaaggaaatagctatttaataattttgcagaaatgatttcttgctgatatgatattctaatatatgatgtaatttgaaatttaattaggggatttttatggtaaaaaaatattatgcagtcaaaaaaggtcgtcatccaggaatatataaaacttgggctgaatgtcagaaggaagttaatggatatccgaatgctaagttcaaaagctttttaacgtttaaaggtgctaatgagtggcttcaggctacgggaaatatcgtaccatcgactaaaacggttgattattctgataacattcttgtttatactgatggaggctcccgtaatcatggcaataaattgggacagcatgttaaggcagatgataaagcggcctgggcttattttattcaaactaaagatcaagcttatacaggaactgctggcgaatttggggctactaataataaaatggagattacagctttaattcaagcactaactaaactattagaacttggcctccaagatcaaccaattacagcgattttggattcacattacgtacttgatccaattatgaaaggctggttaactaattggcagcgacggggatggttaactgctagtggcaagccggtagcaaatcagaagctatgggaagaaatagttacccttttacctcagttccctaatttacattttgattggactaagggtcatgcaacgaatgctggaaataataaggtcgatgaattactaaataagacgatggatcagttataattatttgacaagaggatgataagaaatgagaattggtattgacaaaatggcttttgcaacaacaaatgactatttagaccttgttgaattagcaaaagaacgcagcgtagatcctaataaatttaccattggaattggacaggatctacaggcagttgtgccacctacgcaagatattgtgactttaggagctacggcagcgaaaaaattgcttactccggaattagaaaaaaatatttcgacagtaattgtggcaactgagtcaggaattgacaattcaaaagcgagtgcaatctacattaaacgcttattagggcttagcgacttcacccgaacggtagaaatgaaagaggcttgttattctgcaacagctgctatccaatttgcaaagggagtagtggcgcttaatcctcaagaaactgtattggtgatcgctgctgatattgctcgttatggattaaatacgccaggagaggtgactcaaggagctggagcagttgcaatgctgatttcgcggaaccctcacatcctaacccttgaagatacaacggttgcttatagtaaggatataatggacttttggcggccgttatatgcaacagaagctttagtagatggaaaatactctactaatgtttatattgaatttttccttcaaacttttacccgttaccagcaattaactgggcgagaattagcagattttgctgcccttacattccatatgccatttactaaaatgggaaagaaagggttagaagggctgctcaaagatcgtaatgatgaggtagctcaacgattacgaacacaattaaccgcaagtcaactattttcacgtcaagttggtaacctttacactggctccctatatttatcattaatgtcattgttacaaaatagtgacttaaaagctggaagccgaattgggttatttagctatggttctggtgcagaaggagagttctacacaggaatcctagaagatggctacgagcattatatgaataatattcaagaagaactagaacatcgtcaccaggtttcggtagcagaatacgaaaaactattcagtagtcaattaggaatgaatgaccaggatatcgagtttgatgttactaatgatccattacctttcgttcttaaagggcaaaaggatcatcaacggatttatgaagccaaataacctaaataaaaaggagccccaaaatggactccttttttatttagaaaatatgatcacgaaatagtcccactactttaccaaggatttttacattgtctaagaagattggctccatcgtatcattttctggctgtaaacgaaaacgtgttttttctttatagaatcgtttacaagtagcttcattatcatcattcattgcaataacgatatcaccatttttagcggtggattgtttacgcacaattacttggtcgccattaaaaatccctgctttaatcatactagttccacgaatggtaagcataaacaaatcattattatcttgaatagaaggaggtatcgggaaaaactcagtagcattttcaactgctaaaattggttgcccagccgtaacaacaccaagcattggaatttctttttgaatcggttttacacctaaaatatcaagtcccttgggtgtgatctcaagtgctcgaggtttagaagggtctttttgtaagaatccttgttcaattaagcgagagatgtgtccatggactgttgaagttgaagacaggccaacagcactacaaatttcacgaacagtcggtggatagccatgatcttcaacttgtttatgaatataatttaggacggccatttgtttattttttgctacctttgccatattgacacctcattatcattaattgtgttaagcttatcatagatagatgcatatttcaaacgtacgttcgtgatttgcattaattttataaaataagtaaaatcgactttattaaggagatgattataatggctgaatcgaaagaacaagatgctttattgaagcgaattaatgaacttgctcataagaataaagaagaaggtttaactgaggaagaaactaaagaacgagatcgtttacgtaaggaatacctaaagaactttagagaagcaatgcgtagtaatattgaaatgatgcggatttttgataaagaaggtaaagaggttactcctgaaaaggttcgtgaaattcaacgtaaaaaaggacttcgtgacgattaacagcgatttgctcttttcaaaaattgctctttcgtgtaagatggataggtaacgagcaaaggaggaagtaattgtgggtatgacgatcatgctaatgattcttgcattattagtcggtttggttatcggcttctttggtgcacgtaaatacatggaaaactacctccgcaataatccaccgatttcggaagagatgctgcggacgatgatgcttcaaatgggacaaaaaccatcaagtcgtaaattacatcaaatgatgcaagcgatgaaagcacaagctaaaaagtcaaatcgtaaataatataaaaggatgtgatttttatcacatccttttatattggaaattaaaattcatcattcttcggctttggaggaacaatatatttataattgggatcaatttgtctatctaattggtcaaaggagtcttgcatttgcttttctaagtcagcctgtacttcgggagtgagccgttgctttcggtcaatataaataggcttcccaaatgcaatttggcgcggcttacgggtaaatagctggccaaattttaggggtccctggtaaacagcaggaactaaggggacgtttgccattttagcgatcacggtggccccgccttttaatttagatgagtagcgtgatccgctagggaaaataatggtcgataagtcagtcttctttaaaattgtaaccggctttttaatagcagacggacctggatttttccgatcaaccggataggcatttagtgcttttaagaatttgctagcaattggattcttaaaaagttcttttttagccatgaagctaaattttttgggccatacggcaagcgctagtaagacaggatccatccaagtacgatgaggtgcaataataatataattgccttcagggatgttttcccgattgtatattttaggtcgtccgttaatcaaatttaaaaatggattaacgattttaacgaggaaagtgtacaacatgtcaatcttccaatctataacaaaattaagttttcgttcctcagtatgacgaaaaaaagtggatcttgcaagtacaaaaataatggaggacataatggaaaacagaaatattttaaaaaaggatgaaagaattgatcagttatatagtcaggatgtacggataatccaaaatccccattattttgctttttcgttagatgctgtcttattagcaaactttgtgcgtcccaatcatcgacagaaattaaaaattgttgacttgtgcgctggaaatggggcaatcggcatttttctccacgataagcttggcggaacatttaccgaagttgaattacaaccacagattgctgatatggctgaacggacaattttgctaaatgatttacaagatcgttataccgtcattaatgatgatatcgcaaacgttaatgattatatttctaaggactcgattgatattgtcctttgtaatcctccttatttcccagttacagcccaaagccagaagaatccaaataaagctttagcgattgctcgtcacgaaatagcgactgatttagtgacagttgttaaaaagatgaatggcttattaaaaatgaatggtcatgggtatcttgtgcatcgtccagatcgtttaggtgagattttacaagtgtgtcaggaaaatagattagcacctaaaagaattcaatttattcatcctaaacctgatcgtgatgcgaatattttgttgcttgaagtgattaaggatggccggcctggaggagtaaaagtagtaccaccattgattgttcatggagcagataaccagtatactccagcggttcaggagttattatatggcaagtgagaaatactatatttatgtattgtattgtgcagataatagcttttattgtggctttaccaacaatgttaaacggcgctttcatactcatcaaacttatcaaggggcaaaatatactcgtgtgaaaaagcgtcatccactaaagcttatttattcagaggaatttgaatcaaagcatgatgccttaagtgcggaatattattttaaacatcaaacccgccgccaaaaagaaaaatttttactagaccatggtgttaatttattgaaactacggaggaattaagatgaagatttatatgtatggtgtttatcaggatgaagtcccttacattgaggaatggcaagaggaacatcctgaagtaactgtagactcaacaactaaacttttagacgaaagcacagtcaacttgtctaaaggaagcgatggagtagtagtattccagcaaaagccttattcagacgaggccttacgtcaattagcgtttaatggtattacaaagatgtcattgcggaatgttggggttgataatcttaatcatgaattagtacgagaacttggtttccaaattactaacgtaccagtttattccccagctgcaattgctgaattttcagttactcaagcactcaaccttttacgtcgaacaaaagaattttatttaaaattagcaaaaggagattataactgggcaccgcatattgctaaggaaatgaataagcaggttgtcgggatagttggaacaggaaacattggatccacagcagctaaaatctttgctggttttggtgcaaaagtgattgcatatagccgtcaccaaaataaggaactagaaggaattgttgaatacgttagccttgatgaattatataaacgggcaacaattatttcgctttatttacctcatgttccagcgacagataaaatgcttaatgaaaaaacatttgcaatgatgcaggacggggtcttactggttaacactgcacgtggaccattagtcgatgaaaaggcattgattgaagcgttgaatagcggtaaagtcggaggagctgctttagacgtaatgactggtgaaaccaagatttttaaccagcaaattgatttccaagaagttgattataacgaatttaaggatttagttgatcggccaaatgttttaatcacgccacatattgctttctatactgatcaagcaattaaaaatatggttaagatgagtttgtccgccaatctagatttgattaaaactggcacctcagataaactagttaaattttaaaataagttaagtgaaaaaccttgtcagtttgcaaggttttttgtatactatatttcggtgttacacgccaatttcacacccagaatgatggtggtgagggtgcttaaatagtcccattgccagaagaagactggggaggagaaacaatttggaggtattatttatgtctgttgtatctatgaagcaattgcttgaagccggtgtccacttcggtcaccaaactcgtcgttggaacccaaagatggaagaatacatctttactgaacgtaacggtatttacatcattgacttacaaaagactgttaagttaattgatactgcttacaactacatgaaagatgttgctgctaacgatggtgttgctttatttgttggtacaaagaagcaagctcaagatgctattgaagaagaagctattcgtgcaggtcaatactacgttaaccaccgttggttaggtggtactttgaccaactggaagactatccaatcacggattgctcgtttgaaggaacttaagaagatgagcgaagacggtacatttgatgttcttcctaagaaggaagttgctgtcttaactaagcaacgtgaaaagcttgaacgtttccttggtggtattgaagatatgccacggatcccagatgttatgttcattgttgatcctcacaaggaacaaatcgctgttaaggaagctcaaaagttacacattccaatcgtagctatggttgatactaacactgacccagacgacattgattacgttatcccatcaaacgatgatgctatccgtgccgttcgcttaatcacttcaaagatggctgatgcttttgttgaaggtaagcaaggtcaagacgatgctcaacaagaaactgctgatgataacgctgctaacgaaactgttagcgaagattcattaaagaacttgaagaacagcgttgaaggtaaagaagactaaaaatattaaattcttgggctgttttgtacggaccattctggcctaagtactaaacagcccttttttcaaaaaagattataaaaggagagatttcgtcatggctgaaattaaagctgctcaagttatgcaattacgtaaaaaatccggtgccggtatcatggatgctaagaaggcattagttgctagtaatggtgacatggacaaagcaatggactaccttcgtgaaaagggtattgctaaggcagccaagaagagtgatcgtgttgcagctgaaggcttagctgatattgctgttaatggcaatacagctgcaatcgttgaattgaattcagaaactgatttcgttgctgctagtgaaccatttaaggacttattgaagaaggttactaagttaattagtgaaaacaagcctgctaatgttgaagaagcattagaaatcaagactgaaaatggcacattaaatgatgatattatcagtactacacaaaaaactggtgaaaaggttagccttcgtcggtttactgttgtagaaaaggatgacggcgatagctttggtgcatacttacaccaaggtggtcaaattgctgcattggttgtcttagaaggtgctgacgatgccactgctaaagacgttgcaatgcacgttgcagctatcaaccctgaattcatgactcgtgatgatgtttctcaagaacgtcttgaccatgaacgtgctatcttcaaggaagaaactttaaacgaaggaaagcctgaaaagatcgttgacaagattgttgaaggtcgtttaaacaagttcctttcacaaatttgtttagcagatcaagactttgttaaggattctgaccaaactgttgaacaatacgtttcaagcaagaatggtaagttgaagtccttcattcgttacgaagtcggtgaaggaatcgaaaaaaagcaagatgactttgctcaagaagttaaggaccaaatgaactaagcgttcggtcaaaaggaggacgtactcaatgtagtgcgtccttttttaaagattaacttaccaattcaaggaggatatcatatggcagatattaaatataagcgagtaattttaaagctcagtggagaagcattagctggcgacaagggttttgggattaacccacccgttttaaaggatgtagctaaagaattaaaagaagttcataatttgggcgttcaaattgccatcgttgttggtggtggtaacatgtggcgtggtgttactggtgctgaattagggatggaacgtgcgcaagctgattacattggaatgttagcaactattatgaatgccttatcacttcaagatgcgcttgaatcaattggtgttcctacccgggtacaaacttcaattgaaatgcgccaaattgctgaaccatatattcggcggaaagctattcgtcatttagagaaagatcgaatcgttatttttgctggtggaacaggaagtccttacttctcaactgatactactgctgcattacgagcagcagaaattaacgctgatgccattttaatgggtaaaaatggggttgacggcgtttactcagctgatccaaataaagttaaggatgctactaagtttgatcatttaacccatatggatatcattgaaaagaatttacatgtaatggatactactgctagttcactatcgatggacaatcatattccattggtagtcttcaacttgaacacatcaggcaatattatgaaagtagtaactggtcaagaagttggtacaacaattgaaggagactaataatatggctacaggaaaagaaattttaaatgatgccaaacaaaaaatggcaaaatcaggtgatgcacttcagcggacacttgctgatattcgtgcgggtcaagccaatgcaagtttattaaattctgttaaagttgaatattacggagcaccaactccattaaatcaagttgcatcaatcacaattccagaagcacggcaattattaatcaccccttatgacgaaagcgtgcttgaagaaattgaaaaagcaatctatgcatctaatttaggattaactcctcaaaacgacggaagttcaattcgcttaatcatcccacaattaactgaagatcggcggaaagaattagtaaaggacgttaaagctgaattagaaaaggcaaaagttgcagttcgaaatgttcgtcgtgaagcgatggatgacttaaagaagggtaacaagaatggcgactttaatgatgatgaattccatgatcttgaaaagaaagttcaaaacgaaacagatgctggaattaagaaccttgaagatattgcgaatacaaaagaaaaggaattaatggaaggctagttttcagaaataaaaaggttgtgaactttgcgtaagtccacaacctttttattttggctaaaattgaattgttatgataaaactatgtaacaatttactgtggattgacaaatcgaaatttgcctctggtataataaaggctataattaattggcagacgtgaatttttaagaagtgtctgtaattaatcttaagtacatgataaaaaatggaggaacaattagtgttttccaaaagtaaacatgatgaaataaatcagcaacttgatatggaacgtattcctaaccatattgcaattattatggacggtaatggtaggtgggcgcagaaacgacaccttccacgggttgctggtcataagcaaggaatgcaaacagtaaaaaagattacaattgctgccagtgaattaggggtaaaagtcttatcattatatgctttttcaaccgaaaactggaaacgtccttcttcagaggtaagttatttaatgcagttgcctgtccgcttcttctcaacatttgttccagatcttgtcaaacataatgttaaggtgacagtgatgggagatattacgcaactgcctgaagctacgcaaaaagctgttaaagatgcaatggctgatacagcccattgtacggggatgattctcaattttgctttgaattatgggagtcgagatgagatcactcaagctgctaaagagattgcagaagacgttcaaaatgggaacttggcacttgcggatattgatgaagcttcgtttggtaagtacttgatgtcagcacaactgggtcaatttgcagatcctgacctgctaatcagaacaagtggcgaagagcggattagtaactttatgctgtggcaaattgcttatagtgaattggagtttgttccagaacactggccagactttgatgaagattcattacggtcagcaataattgcctatcaaggacgtcatcggcggttcggtggactaaaaaatcaataaataataaggggattttgttttgaaaacaagaataacgaccgcggtaattgcacttgcaatctttataccgcttattatatatggtcattggccattaacaattgcagccgttgccttaggaatggttgcaatgtcagaagtattggtaatgaaaaaaatgtttgtaatttcgtttgaagctttgatcagttatctgggggttgcattattaatactgccggatagttggcttgacttcttgcctagtgttgcaactcgatggttcggattctatattttagttgttttacttctattacatacggttattcgaaaacaacgctttactttcgatgatgctggggttttaacattagcaatgctctatattggaatgggatttcgctattttattgctgctcgtgcaatcaattttcaaacgctattatatggaatgttaatcgtttggattacagatagtggagcatatttaattggccgaaaaattggtaaaaataaactcgctcctaagattagtcctaataaaacttgggaaggttcaattggtggtacattagctgctgttattattttggctatttattgctactttatccctgttggtgcaggttgggtaacaatgatattcgttactttgattctttcaatcttcggtcaatttggtgacttaatcgaatcatcattaaaacgctactatggtgtaaaggattcgggaaaaattcttccaggccatggcggaattttagatcggtttgatagtatgctaattgttatgccaatgcttcatttattagggatcatttaatcaaacgtaaggaagagattttttgataataacaattattacatttattattgtttttggaatccttgtccttgttcatgaatatggtcattattattttgctaaacgagcaggaattctggttcgtgaattttcaataggaatgggtccaaaaatttggtggaaacgaaaaaatggtactacctatactattcgaattttgcccctcggtggttatgttcgtttagctggtgctgatgatgaggaccaagatgagttaaagccaggtacccctctaacgattcaactaaatgatcaagataaagttattagtattaatgctagtgataaaacaaccttatttcaggggatcccccttcaattagttgcttgtgatttagaagatggcttatggataaaaggatatgtcaatggggacgaagatcagctgaaggtatatagtgttgaccatgatgcaatgattattgaacgagacggaaccgaggtacagattgctccacgtgatgtgcaatttcgttcagcaagtctgcctgcacggatgatgactaattttgctggtccaatgaataattttattttgtccttagtagtatttatcattcttggttttaccttaacgggcgtaccaactaatagcaatcagttagggcaagtgaatgccggttccgtagctgccaaagcgggcttaaaagcaaatgatcggattgttaaggttaacaaccaaaaaataaataattggactgacctttcaactaatatttcaaataagcctaacaagacagtatcagtaacgtatgagcgtggtaataagacatatcatactaagctaacaccaaaagcagttgagcgagggcatcagaaagttggccaaattggaattgttgaaaagcaagagagaagtttagctgctcgattaaagtttggttggcaacaatttatccaagcgggaacattaatctttagtgttcttggtcatatggttacccatggatttagcttaaatgaccttggtggaccggtagcaatttatgctgggacatcacaagccacctcattgggaatcaatggagttttaaatttcttagccctcttatcaattaatttaggaattgttaacttattaccaattccagcattagatggtgggaaattattattgaatattgttgaagcgatcattcggcgaccaattcctgaaaaagctgagggaattatcacaatgattggttttctaatcttactaacacttatggttctagtaacatggaacgatattcaaagatattttattcggtaattaaaaacaaaggagtatagttttaatgaaacagtcaaaggtattaattccaacaaaaaaagaggccccaagtgatgcagaagccttaagtcataagatgatgattcgtgccggctacatttaccaagtatctgcaggggtatggtcatatttaccattagcttaccgggttattcgaaaagtagaaaatattattcgtgatgaaatggataaggccggagcggttgaaatgcttatgccgggacttcttccagctgatttgtggaaggaatctggtcgttacgaaagctatggtgataatctttttaaacttaaagatcgtcgtgaccgtgactttattttgggcccaactcatgaagaaacctttactgaagtattgcgtgatagtattaagtcgtacaagaagctgccattagtagtttatcaattacaagataagtttcgtgatgaagatcgtcctcgttatggaattcttcgtggaaaagaatttgaaatgcttgatggttattccttctcagcagatcaagaaggattagacgaagcctacaataatcaagcaaaggcttaccggaacatttttgatcggattggcttaaactataaagttattctcgctgattcgggaacaatgggtggtaagaactcacaagaattctctgcaccagctgaagtaggggaagacataatcgcttatactgatggagattacgctgccaatattgagaaagctgaaagtaaatttactggtgtacaacgaacagctgctcctgcaccaattgagaaaaaagctactccgggtgctcatacggtagatgaagctgcagaaagtttagatcttgatcctaatcaagttatcaaatcaatgctttacattgctaaaatgagtgaagatgaataccaaccggtcttagtattaatgcgtggcgacgatgaagttaatgaagcaaaggtaacgaatgctcttgattgtgaagaacttgaattagctacagaagaagatgccgaaaagtaccttaatgctcatcctggatcattaggacctgtaggagtaggcgaagaagtaaaaattcttgctgataattatgttaaggttttagttaacatggcatgtggtgctaatgaagatggttaccattatattaatgctaatattgaccgtgacttccgcgttgatcaatttggtgacttccggaatgttaaagaaggcgagattgctcctgatggtaaaccacttaaatttactcccggaattgaaattggtcatatctttaagttaggtactcattactcaagcaaacttggtgcccaagttcttgatagcaatggtcgtttgacagacgtaatcatgggaagttacggtattggtgtaacccgtctattgtcagctgttgcagaacaaaatgctgatgaaaatggtcttgtctggcctaatagtattgctccatttgatgttcatgtaattccagttaatgcgaagaaagaagatcaaatggcaatggctgataagatcgatcaacaattaactgaagctggttatgaggtattagtagatgaccgaaaagaacgagcaggggttaaatttgctgattcagacttgattggtattccaattcgggttactgttggtaagaaagctcaagatggtattgttgaaattaagatccgtaaaactggtgaaactgttgaagttaaacaggaagagctagtaaatacggtgggaattttactaaagcaattgaacgaagaaaaaaacaaataatttaaactaatgtggctgcgatgttaagataaataacgttactcgcaccacatttttaagtaggaggattagaacgtgggattaagtcgccaagaattatttggaaaactattagaacaaattcactttccggaaaaagacaattctgcattcagaaatgccgcagttcaatcagttgttgttcataaaaagtctcggcactgggaatttcacttaatctttaataaagctttaccgtatgacctatttacgcagttcaaccagagcttacagctagggttcaaagatattgctaaagttagtttgaagattagtactcccatgacaaaacttgatgaatcacagatagctaattattggcagttcatcattaataaggcaattagtgatacaccaatgctccaacaagcttgcttacaaacggctcccgaggttaaggagggtcgtgtaacgctagttgttgaaaatgaggtaattaaagacttactagcacagaaagcattagataagattgaaaaatcataccaagagctgggctttcctaaatttaggattcacccatttgttgaccagtcagcctcgcaagcaaaaattgaagaattaaaggctaaacacgagaaagccgatgctgcgcttgctgccaaggcggctgcccggatcaagaaaaatgaggctgcaaagaagacagcaaagaagagtgcaccagttgctcctgctgatggcccagttcaacttggccggatgattgatagtaagcagaatgttattcaaatgaaagacattgagggtgaagagcggtccgtggttgttgaaggatatgtatttaatgcagaaattcgcgaactacgctcaggtcgtcaattattaacctttgaaattactgactacacttcttcttttgctgtcaagaaattctcacgcaacagtgatgaagaagcacaatttgccaatatcaaagcaggaatgtggttgaaagttcgcgggcctgtacaagaagatacttggatgcgagacttggtaatcacggcttatgatgttaatgaagtaactcatacggcgcgtcaagataaagctcctcaagatgataaacgagttgaacttcatacgcatacaacaatgagtcagatggatgccactaattcgattactgagcttgcaactcgtgctcataagtggggacatccagcaattgcggtaaccgatcatgggaatgtccaggcttttccagaagcatttagcgtggcccaaaaaacgggcattaaaatgctatatggaatggaagctaatgttgttgatgatggaattccattggtatacaacgagaatcatgaagaactcgctcatcagacctatgtcatttttgacgtggaaacgacagggttatcggcaatttacgataaggtaattgaattgtctgcagttaaaatgcaagatggaaatgtcttagaacgttttgatgaattcatcgatcctggtttcccgttatcagaacaaacaactaatttaactagtatcaccactgaaatggttcagggttcaaaaactgaagaagaagtttttcagatgtttaaggacttttgtaagggctgtatcattgctggtcataacgttgcatttgatatgggttttatgaatactggctatgaacgtcatcaaatgggaaaaatcgcggaaccagtaatcgatacattaccactggcgcgattcttatatcctgatatgcgaggataccgattaaacacgcttagtaaaaagtttaaggtagcattggaacatcaccaccgtgctaactatgattcggaagctacaggacacttgctttataagttcttgaaagatgctgaagcccgttatgatgtgaagtatgtggatgatttaaataagcacatggaagaaaataatgcttaccgtcatgcgcggccttttcatgtaacgatttttgcgcagacccaggctggtttgaaaaacttatttaagttagtatcgctatcaaacgttgaatatttttaccgagtaccgcgaatcccgcgaacagtgctgacgaaatatcgtgaaggactgcttttgggaactgcttgttcatcgggagaagtatttaccgcgatgatggagaaaggttacgatcaagcactagaaaaggcgcgctactatgattttattgaagttcagcccaagccaaactatgcaccgttacttgaacaacatgtgattgcagatgaagaccacctcgaagatatcctcaaaaatatggtcaaactaggggatgagttggaaaaaacagtggttgccactggagatgtccattaccttgatccacatgatgcaatttaccgtaagatcctgattaattcgcaaggtggcgcaaacccgttaaatcgaactgagcgtccagaagtgcactttaggaccactgatgaaatgttaaatgaatttgcttttctcggtgaagaaaaagcccacgaattagttgtagagaatagtaataagattgcagctgagattgatgacaatattcggccagtaaaagataaactttatccaccgcatatgaagggggccgaacaggaaatccaagatcggacatggaatactgcgcgaaaatggtatggtgatcctttgccacaactagttcaggaccggattgaattagagttgaacagtattgttaagaacggattctctgttcactatttaattgcccaacgactagtagctaagtctaataaagacggatacttagtaggttcgcggggatctgttggttcaagtgtggttgcaacgctttcgggaattacagaagttaacccgttgccaccgcattaccgttgtccaaattgtcaatttacccacttctatacgcaaggggaatatagttcaggtttcgatttgccagataaaaaatgtccaaagtgtggcactctaatggtaaaagacggtcatgatattccattccaaactttccttgggtttaagggtaataaggtaccagatattgatttaaacttctctggtgactaccagccaattgcccataactatatgaaagtcttattcggtgaaaaaaatgtattccgtgccgggacaattggtacggttgctgataagacggcatatggatatgtgaaggcttacgaacgagatacagaaaaggaatttagaaaggcagaggaggatcgcttagcaaaaggagctactggtgttaagcgaactactggtcagcacccagcgggaattattattgttcctgatgatatggatatttatgactttacacctgtacagtatcctgctgatgatcaaacagctgcctgggaaacaactcactttgatttccactcgattcacgataatattcttaaaatggatattttgggacatgatgatccaacgatgattcgtgccttgcaagatttatcaggaattgatcctcaatcgattccaatggatgatccaggggtgatggccttattctctagtcctaaggtattaggggtaactgaagaacaaattcaaagtaaaactggtacactaggattgccggaattcgggacgcgatttgtccgggggatgctggaggatactcatccgaaaaattactcgcaattattacaaatttctggtctttcacatgggactggtgtgtggctagataatgcccaggaactaatcaaacagggaattgccactatcgctaatgttattggttgtcgtgataacatcatgaccgacttaatccactatggaatggactcagaaatttctttccaaattatggaacacgtacggaaggggcgcgggattccagacgagtggcaagaaaagatgcatgaagctaatgttccacaatggtatatggactcatgtttgaagattaagtatatgttcccgcgggcgcacgcggctgcttatgtcttgatggctctacgaattgcttactttaaggtttatttcccgttagtttattattgtgcattcttctctgtgcgagcagatgactttgatgtagtagcgatgtctcatggtaaagatgcggttaagcaacggatgaaagaaatcaatgataagggaaatgatgccagtgcaaaagagaagaatctcttaacaattcttgaactagctaatgagatgctggaacggggctttaagtttaagatggttgatattgaaaaatcagatgcctccgattggttgattgatggtgattcattaattgcaccattccgagcagttcctggattagggctaaacgttgctaagcaaattgttgccgcacgtgaagaacgtccattcctttctaaagaagatttggcagagcgtggaaaggtttcgcagacacttattgactttttgacagataatcatgtattagataagctgcctgacgaaaatcaacttagcttgttttaaggaatagtaatgaaaacatgcttcattgcttgccagtggctgtgttacatgctacaatagattatggtaaataactcgtgggagtgagcagagatgctcgctctttttattgcaaataatggaggtgacacgtttgagcagtgttgtagaaactgtaacagatcttgtaacgccgattttacaggaccatgatttttacttatatgatttagagtttgtaaaagaaggtaaaagctggtacctccgcgtttatattgataaagacggtgggattacgctagaagattgcgcacttgtcagtgatgaattaagtgaagcattagataatgttgaacctgatccaattccacaggcttactttttagaagtttcctcaccaggtgctgaacgcccactgaagaaagaggaagattatcaacgagcaattgaccattacattcacatttctctttaccaacagattaatggtcaaaaggtttatgagggtacgttaacgcaattgtctaataaagaaattacgttggattatttagacaagactcgtcatcggcaaattacgattgatcgtcagaaaattgcccaggcccgattagcgattaaattctagtattaaaggagtgtcgaaaggtgagtaagccaaaaattaacactgagatgattggcgcccttgattatcttgaaaaagaaaaggggatcaagaaagagattgttattgaagcgttagaacaagcacttgaatcagcatacaagcaaaattacggtgataagaatgttgaagtagaattcaattcattgactggtaatattaaagtctacgctgtaaaaacaattactgatgatgaagaagcagtcgaagcagacagcaacgaatttatgagtttagctgatgcacggaagcttcctcatggccaaggttatgatattggtgatgaaattcgcgaagaagttacccctcgtgattttggtcggattgctgcccaaactgctaaacaagtagtaatgcagcgtctccgtgaagaagaacggaaaatcatttacgacaagtataagacttatgaaaatgagattatcactggtgaagtttcacgagaagataagcgtttcacatatgttgatttaggagatggtgtagaaggtgccatgggctttagagataagatgcctaatgagcactaccacgtccatgatcggattcaagtatacgtaacgaaagtaaatgacgatcgtcggggaccacaaatttttgttagccggactgctccagaacttttaaagcgattatttgaacgagaagtgcctgaaatcaaggatgggactgtcttaatcgaaaatattgctcgtgaagcaggtgatcgtgctaaggttgcagtatactcaaatgatcctaatgttgatccagttggaacttgcgttggtccacgaggttctcgtgtacaagcaatcgttaatgaacttgatggcgagaatatggatattgtggagtatgttaaggagcccgctaagtttatcgctaatgcattgaacccagcagaagtactggatgtaatctttaacgaagagaaggcagcaagcgaaactgaggatagcgaaggtgaagaaacgactgaaggacaaacagaacgttcatgcactgtcgttgtcccagatagccaattatccttagccatcggtaagcgaggacaaaatgctcgtcttgctgctcggttgactaagtacaagattgatatcaagtctgaatctgaaatggctgaaaatgaccaagaatctgaagaagtagctgatttagaagaaaatgttgacaataacgaagaataactagaaattaagcagcggggtgaaaataatgaaaaagagaaaaataccgatgcgtaaagacattgttaccggtgaaatgatgcctaaaaggcaattgattcgggtagttaagaataaggaaaatgaagtctccttagacccaactggtaaaaagcctggtcgtggagcatatgttgcagtagatgtggatattgcaaagcgcgccaagaaagaaaaaacttttgaaaaagcttttcatgttcaacttgatgaatcattttatgatgaattaatcaagtatgcagaccacctacaggcacgacaagagttatttggtaatgatcaaaaataaagaacaggtcttaaacctccttggaatcgctcggcgtgcccggcaacttcagagtggggaagagattgtcttaaaaaatattcaaactaaaaaggcaaagtttgtattcctagcttcagatgctggaaaagctagtgcaaaaaagattactgataaatgtaaattttatggcattcctttttcaacagatttcactagagaacaacttagccgggcaacagggcaagcacgaacagttttttgtgtaatgcaatcaggttttgcaagaaagtttgaggaactactaactatgagataaggagtgtgagcatatggccaaagaacgaatttatgaattagctaaggaattaaaaatgcctagcaaagacttagttaatatggccaatcggcaaggaatgggagttaaaagtcacatgtcttctgttaccccagatcaagcgcaacaattacgtcaacttgcaaagggtggacaaaaaacaactaataatcaacgccaaccagtaaagaaaaatgatggtcacaataagcaaaataaccatcaagcacaaaatcacaatcaacaccacgatcatgataaggcacaaaatgagcgtccacaaaagaaaaacaatagccgaccaaacaatggaacaaaagataataatcaacaccaaaacaatggtggtcgatttggcggcagcttaaataacgatcaaggccgtaatggcaaacgctttaataagaaaaataagaagaataagaaacacaataagaacaagcggttacgtgaagtagctcataagcaaccaacacaacgaaaagataagccgcttccagaagtattagaatatactgatgggatgaatgcccaagacttaggaaagatcttacaccgttcaccagcagaaatcgttaaaaagttatttatgcttggtgtaatgatcaaccaaaatcagtcacttgataaggatacaattgaattattagcaactgattacggtattgaggctaaggaaaaggttcaagttgacgtttcagacattgataagatgtttgaagatgaacaaaataatactgaacatcaagtaacgcggccagctgttgttactgttatgggacacgttgaccatggtaagacaaccttgcttgataagttacgtcactctcatgttactgaacatgaagcagggggaatcacccaggaaattggtgcttaccaagttcactataatgatcaattaattacgttccttgatacgccaggacacgcggcctttactgaaatgcgtgcacgaggagctaatattactgatatcacggtccttgttgttgcagctgatgatggagttatgccacagacagttgaagctattcaccacgcgcaagctgcccaaacaccaattattgttgcagttaacaagattgataagccaggtgcaaatccagatcgtgtaactgaagaattagcaaagtataacttgattcctgaagactggggtggagatacgatttttgttaagatttctgccaaatttggtaagaatcttgatgaattacttgatatgattctactccaagctgaaatgctggaattaaaggctaatccggatcaaaatgcggctggatcagttgttgaagcccgccttgatcaaggtcggggatcagttgccactgttttaattcaacaaggtactcttcatgttggggacccaattgttgttggtaacacatttggtcgtgtgcggacaatgacaaatgaaaatggtcgtcgtattaaagaagctaccccatctactcctgttgagattactgggttaaatgaagtaccagaagccggggatcggtttgttgtctttgatgatgaaaagactgcccgtgcagcaggtgaagaacgggcaaaacgagcaatggataaggaacgtcaaaagacttctcatgttacattagataacctctttgcaactatgaagaagggtcaaatgaagaccttaccgattatcattaaagccgatgttcagggatctgttgaggctctaagtcaaagccttcaaaagattaaagttgacggtgttcgtgttgatattattcaccaagccgttggtgccattaatcaaagtgatgttaccttagctgaagcgtctaatgcggttatcattggttttaatgttcgcccaactgccgtagctaagacattggctgactctaatagtattgatatccgtcttcaccgtgtcatttacgatgcaattgaagaagttgaagatgcgatgaagggaatgcttgaaccggtatacaaggaagaaacaattggtcaggtagaagttcgtcaaatctataaggcatcaaaagttggtacaattgccgggggaatggttacttctggtaagattacccgtgatgcaaaggttcgtttagttcgtgatggcgttgttatttacgaaggtgaattaggtagtcttaagcgcttcaaagatgatgtcaaagaagttaagcaaggttacgaatgtgggttgacaattgaaaactacaatgacattaaagaaatggatgttattgaagcctacaagatgaaagaagttccagttaagtaaaagctgaggagagataaagatgccaagtaaacaatatcgagtagaccgtttagctcaagaaattcaaaaagatgttgatgaaatcttgttaaaacgtgttcgtgatccacgtgtacaaaacgttacaattacaggtgtggatgttactggtgatctccagcaagcaaccatctattacagtatcttgtcagatcttgcttctgatgcggagaaggcacaggctggattagataaggcaactgggttaattcgcagtgaattaggcgcacgtcttaatatttttaagactccagaaatcaaatttgtaagagacccatcagttgcttacggtagtcgaattgatcaactcattaacgacttacacaaaaaagaaaaataattagcaggaaaagggagcgagacagaagttacttgtgacttcgtttttcgacgcgaagcaagcctctgggagcccctcgcaagcaacaggcctccaacgttcgtttttttaccgagcgatgggggccattgttgtactgcactatttgtcttttgtgaaagtaacttgacttatatcacagcagccccttggaggaataatgatggatggaataatacccttatataaagaacgtgggatgactagttttgcatgtgttagtcgactacgacaaattttaaaaactaaaaagattggtcattcaggaacacttgatccaggtgtagcgggtgttttaccaatttgtgttggaaatgctaccaaagttgttgattatttgatgcaatcaggaaaacaatatcaaggcgagcttttaattggttttgcgactactactcaagaccttgatggagaaaaaattgaggacaaagaagttacaaatgaaattccgactagtgaaatcctatcagccatgaattcattaacggggacaataatacaaatcccaccgatgtattcggctgtaaaagtaaatggaaaaaaactttatgaatatgcaagaactggtgaaactgttgaacggcccaaacgacaagtgactattagcaaatttgaattactaagctcaaagtatgatgaggaaaataaacaacaacgaatccgttttaatgttgaatgtagtaagggtacttatattcggacgcttgttgttgaccttgcacgtaaactagggtatccaggagtaatgagtttgttaacgcggttgaagagtggaggctttactcttgatcagactctaagtttagacgacgttcgcgatgctgttgcgacccaaactctccagcaatatttgtatcctttagattatgctttgaaggactatccgcaattaacgattcaagaggctcaatggaaaaaggttcaaaatggaggatggctttctccaagtgaacttaatactagtgagaaggaaattgtgttatcatttgatggacaagtaaaagcactatatcattttgatccgaaaaataaaatgtataagccaactaaaatgtttgcagttaattgaggagtgtaggagttgcaagttattaaaattcaccatcctttggaaaaaagactaattcctgcggggccaattgtacttgcaatgggtttctttgatggtgttcatcggggacatcaggcagtaatcaaacgtgcccgtgaaattgcccgtgaaaaaggattgccattagtagttttgacgtatgatcatgctccaggaattgtttatcgtcaatataagggcggctttaaatatctatcaacggtcgataggaagcttgagttattaaatgaccttgatgtcgatcgggtttatttaataagctttacctcgtcttttgcaagtctttctcctcagcaatttgttgatgagtatttggtaggctttcatgctcaaacggtcgtagcaggttttgatcatacttatggaaaagaagatattgcatcaatgaagttgcttcctaagtatgcagcgggacggtttgaagttgtaactgtgcccaaatttactgaggatggaagtcaagaaaaggtcggttcgcgagaaattcggaaattaattgatgctggtaatgtagaagcagccaaccaagcactagggtatccttatcaaacaactggcttagtagttcatggcttagctcgtggacgaacacttggttttcctacaatcaatgttgagcatccagaagaggagcgaattcctgggattggggtctatgctgtcaaagttaagctcggtaagaagtggtatgacggcatggcaagtgttggccataacataacatttggcgatgctaatcaattaacggttgagattaatctatttgattttcaacaaatggtgtatggtgaagaagtagttgtgcgctggtatcagtaccttcgtggcgaagaaaagttcacgggagcggatgcattagtagcacagatgaagcaagatgaacaaaacgcccgtcgtattttagaaaaatataaataaaagaggtttagattgatctttcgtggcaatttcgccaccaagattcatcaaacctcttttttaatgccgacttccccgatgactggtagtctggttaattttatgaatatttcgttcaaatttgaatccgccatcagtcactaatttgaaatgccgcattttcccgttaaaaggctggccgtttaagcgtactgttgtccagttacgcataatttcggtcatggaagcaagtgccttaagttgattaggattgttctccttaattgcttcgtctttaatatctgactgcaaacgatagattaggttgttatggtattctaatagttcattcgttagggacgcattgcggtatttattaaataacttctgaattaataacattgcttcttgagtattctgaggttgaatatagcgatgttctttatgtttcatggataaagctccttttaaaaattatttgacgtttcttgacttttaggggagtaattggtatattatacagtgtgtttagcacttgaccctaatgagtgctaaaaggggaagtgatatacgatgctaacacaacgacagaaaaagattctgcaagcgattgtacgtcaatacacatcaactggtcaaccggttggatcaaaacatttagcagaaaagttgccttttaaggtcagttcagcaactgtccgtaatgagatggcggttttagaggacaatgatttgatcttaaaagagcactcttcatcaggccggattccatctaaacgaggttaccgttattatgttgataatttgcttgatccacaagcagttactgataatgacctggtagtaattcaaaactcacttggaaccggttttcaaaagattgacgagattatttcacattcagcagatatcttatcaaacttaacttcatatactgcttttacattaaagcctgagcaagaaagtgttcgtttgagtggctttcgagttgtgccgctaggaaatcataaggttattgcgatcttggttaccgatagcggtgaggttgaaaatcagtcattcactttgccggcagacattgacacagatgcattgcagacagtaattagaatgattaatgatcaattagttggtttgccgctatcagaagtggtaaaacgactaaaagatgatattccacttcaggttctgcattatatgcatagtcccgatggtttccttgatatttttgataatgtcttatctcaagcagcacgtgagcggtttttcgttggtggtcgattgaacttactggattttgcaagtactcatgatccccatgcaatccaatcactgtatggcttgttagataagaacgacaacttatcgaatatcttggattcaacacttacctcagataatggagttaatgttaaaatcggtcaagaaatctctaagaataagcttcttgatgattatagcttgattactgcaagttataatgttgaacaatatggacgaggaattattgcagttcttggtccaacaaggatgccttattcacggacgattggaattgtaaatgcctttcgccaagaattagcaaaacggctattagatttctaccgtcactattatgattcataggaggcgagttaattggccaaggaaaaacaagaagaacaacaaaaacaaactgcgcctgaaaatgaaaaggcacctaaaaaagatataaaaaaagaggcttcagataagaaggatgatcaaactgttaaattaaaagaagagatcgctgacttaaagaagcagctcgctgataaagatgacaaatatttacgagcagaagcagaaattcaaaatatgactaatcgttttaataaagaacgggctcaaatccttaaatatgatggtcaggatttagcaaagtcaattttaccagtgcttgataaccttaaacgggctttagcaattgaagttgtagacgataatggcaagcaacttaaaaagggcattcaaatggtccatgatcatcttgtaaaggcattaaatgatcatggcatcactgaaatcaaagctgatggtgaaacatttgatcctactcttcaccaggcagttcaaactgtttcggtcgaagaaggtcagaagcctgaaactgttgttaatgttcttcaagcaggatatcaactcaaagaccgggtattacgcccagcaatggttgttgtagctcaataaatttgtgagagaaggaaataaattatggcaagtaataagattattggtattgatttaggtactactaactctgcggttgctgttatggaaggtaatgaacctaagattatcaccaacccagaaggaagtcggacaacaccatctgttgtttcatttaagaatggtgaaactcaagttggagaagtagcaaagcgtcaagcgattactaatcctaacactatttcatcaatcaagagtcacatgggtgaagcaggatacactgttgaagttgatggtaagaaatatactccacaagaaatttcagcaatgattttgcaataccttaagaaatatgctgaagactacattggtgatactgttactcaagcagttattactgttcctgcatacttcaatgatgctcaacgtcaagctactaaggatgccggtaaaattgcgggccttgatgtaaagcggattattaacgaacctactgcttcatccctagcatacggtcttgacaagaaggacaaagatgaaaagatccttgtttatgaccttggtggtggtacattcgatgtttccatccttgaattaggtgacggtgtcttccaagttctttctactaatggtgatactcatttaggtggggatgactttgaccaaaagatcatggattggttaattgatggctttaaggaagaacatggtgttgatctttctcaagataagatggctcttcaacgtttgaaggatgctgctgaaaaggctaagaaggacttgtcaggtgttcaagaggcacaaatcagcttaccatttatttcagctggtgaaaacggtccattacacttggaaaagacattaagccgggcacaatttaaccaattaactaatgacttagttgaacggacaaagcaaccagtattgaatgctttgaaagatgctgatcttacttttgatgacattgatgaagttatcttaaacggtggatctactcgtattcctgctgttcaagaaatggttaaggaattaactggtaaggaacctaaccactcaattaatcctgacgaagccgttgctcttggtgcagctattcaaggtggggttcttactggtgatgttaaggatgtcgtattacttgatgttactccactttcacttggtattgaaaccatgggtggtgtcttcactaagttgattgaccgtaacacaactattcctacttcaaagagtcaaatcttctctactgctgctgataaccaaccagctgttgatattcacgttcttcaaggtgaacgtccaatggcagcagataacaagactttaggtaacttccaactaactgatattcctgctgctcctcgtggtgttcctcaaatcaaagttacatttgatatcgataagaacggtattgttaatgtttctgctgaagatcaaggaactcacaagaagcaaaatatcactatcaagtctaactcaggcttaagtgatgaagaaattgaacggatgaagaaggatgctgaagagcatgctgaagccgacaagaagaagaaggaagaagttgacttaaagaatgaagttgaccaagaactcttccaagttgataagactttgaaggaagttaagggtaaagttcctgaagatgatatcaagaaggctgaaagtgctcgtgacgaattaaagaaggctaaagaaagcggcaaccttgatgaaatgaaagctaagaaggatgctttaaacaaagttattcaagaccttagcgtaaagctttaccaacaagctcaaggtgcacaaggtggcgctgctaatggtcagcctggtgataaccaacaaaatggtaataacaacggtaatgatgacaatactgttgatggtgattttaaggacgttacaccagacgacaagaaatagcctgcggtaaacagtcttaaaatgttagtgtaaaagccaaaggccagaaaaaaggactttggcttttactttcgtttgctggctgtggtataactaaacaagcaataaagtaatgaggtatttattatatggcagaacaagattattatgacattttaggtgtctctaaggatgcatccgaaaaagacatcaagcgtgcatatcgtcggcttgcggcaaaataccacccagatgttaaccacgagcctggtgcagaagaaaagtttaagaagattaatgaagcatatgagacattaagtgatagccaaaaacgtgctcaatatgatcaatttggttcagctggcccacaaggtgctggcggtcaaggctttggcggctttggtggtggtcaagcttattctaactttggcggcggctttgacgacatctttagtcaattctttggtggcggtggtcgtactcgtcgggacccaacagccccgcgtcaaggacgtgatttacaatatgcaatgactcttgattttatggatgcggtttttggtaaaacaactactatcaagtataaccgtgatgcagaatgtaagacttgtcatggaaccggagcaaagcctggtaaatcgccaataacttgtccacggtgtcatggtgccggcgtgattacgagtgttcgtcaaacaccactaggcaatatgcaaactcaaaccacttgtccagaatgtaatggaactggaaagattattaagccagaagatcgttgtgatacttgccatggtgcaggacatattcacgaacgtcatgagctagaagtgaaggtgcctgccggtgttgatgatggtcaacaaatgcggctccaacaccaaggagacgctggtgagaatggtggcccagccggagatttgtatattgtcttccgggtaacaccaagtcgtgaattccgtcgtgacggttcaacaatttacgttgatcgtgatatttcgtttgctcaagcagccttgggagatgaagtaaaagttaaaacggttcatggtgatgttaaccttaagattcctgcgggaacccaatcagaaactaatttccgcttgcgtggcaaaggggttccacaccttaacggtaatggtaacggagatgaacatgttactgtccatgttaagacacctaagagccttaacaagcgtcagcgtgaagcaatgttagcttttgcggctgctagtggtgaagatgttaagggtgtgaagaagacagttcttgataagttacgtgatgcctttgaggataagtaaataatttttatgaagcaggaaaagcttaatatttttcctgctttttgtatatctagtagaaggtttcccattctaaacgaggatttggtatactagataaagaatattcgttgaaagtgagtctttttaaatgaacctagaagaaatgaaagagcggcaaaaacacattcggaatttctcaattgttgcccacattgaccatggaaaatcaacgcttgctgatcgtattttagaaatgactgattcaatcagcaaacgtgaaatgaaaaaccagattcttgatgatatgcctctagaacgtgaacggggcattacaatcaaattaaatgccgtcgccttgacatatcatgctaaagacggtgaagattacattttccatttaatcgatacaccaggccacgtcgatttttcttatgaagtatcacggtctcttgctgcctgtgaaggtgccgtcttagtggtcgatgcaacgcaaggggtagaagcacagacccttgctaacgtctttttagcgcttgacaatgaccttgagatcttacctgttatcaataagatcgatttaccttctgctgatcctgagggtactaagaaacagattgaagacgagattggtttagatactgatgaggcagttgatattagtgctaagactggaatgggcgttgatgaagtccttgaaaaaatcgttaaggatgtcccagcaccaacaggagatttaactgcgccgttaaaagcccttatctttgattcaaagtatgatgattatcggggcgtggttcttagtgtccgggttgttgaaggaacggttaaaaaaggtgaccgaattaagttaatgaacggtggtaccgaatatgaagttgctgaagtaggaattaactctcctaaaccattggcacgtgatgtattgatggctggggatgtaggttatattaccgcggcaattaaagacattaaagatactcgggtcggtgatacggttacaagtgcagataatcctacagataagccgttagaaggatatcggcaaatgacgccaatggtatatgctggactttatccaactgataatgctaaatttaatgatttacgtgatgcgttggaaaagcttcaacttaatgatgcagcattaacctttgaaccggaatcatcgcaagcattgggatttggattccgttgtggtttcttaggattacttcacatggacgttattcaagaacgacttgaacgtgaatttaatcttgatttaatcacaactgcaccatctgttacttaccatgttgaattagcggatgggacaacaaaagaagtggaaaatccagctgaaatgccagacgcttcttccattaaagcgattaaggaaccatatgtccgcgcttcaatcatggtacccaatgattatgttggcccagtaatggagctttgccaacgtaaacggggagactttgatacgatggaatatctaagtgatacccgggtaaacgttatttatcatattccgctgtcagaaattatttttgacttctttgacaagttaaagagttctacacggggatacgcttccttagattatgaaattgatggttaccggtcaagtaatttggttaagattgacatcttgctcaatggcgataaggtggatgcattgagctttattgctcaccgtgactttgcggcagaacgtggtcgggaaattactgctaagttaaagaagattattccacggcaaaactttgaaatcccaattcaagcagcaataggctcaaaaattattgcccggaccaatattaaagcctaccgaaaagacgttactgcccgtattcatacaggggatccagaccggcgtgctaaattattagataagcagaaacgtgggaagaaacggatgaaggctgtcggaaaagttgatattcctcaggccgcctttatggccgttttgaagaccgatgagcaattggatgagaagtaaacgttgatgtaaaggtatttattggctttgtataaaacaaaaaatatacaaaactagtaatttttaccacgtgagcttaaaatgtggtaaaaattaaggatcagtattccctaagaaatagaggtactgatccttttttgttatggttctacaatatctggtgttgatatagaaatattacattctataccaatatcagattttttgtttttaaactaaaaaagaggctcgccctctgatacaatgaaatcgccaaatcacatagaaaagaaggtaaccccataaataataatacaaggactctcctcgatttaacagattctcatttaattttttcatcattcgattaaacatggtgggtttttatactcgctcaatactgcagtcctcaccaaattagcgtatcatagataatgtaatcgctattatttgaggaggaaataaatatgcaaaataaagatgcttgtacatcaattatggtcggtaaaaaggcttctctcgacggtgctaattatattgctcgtaatgaagatcgcgtaaaagcaattgaacccaagcgatttttagtaaaaccggcagtaaaaggacgccacgaaacctacgtatcaccttacaataaagtaactgtagctttgccggaagagagaatgcgttatacttctacgcctacccttgatcaaacagccggacctaatgaagaagatggaattaatgaagcaaatgtggcagcttcctttactgagagtgtttatgcaaatgatcgggtgttagcatatgatccatacgtaaaaaatggcctggcagaagactcactttgtactttagtattaccgtatattcattctgcccgtgaaggagttgaatatactggaaaattaattgctgaattgggctctgctgagggaaatggaatgcaatttgcagatgcagatgatatttggtatatgtaagtagtaactggtcaccaatgggttgcagttcgtattcctgatgattgttatgctgttactcctaaccaggtagcaattgaagatatcgattttgacgatcctgataattatatgtgggctgatggaattcaagaatttgttgaagaacaccaattaaaccctgaccatgaccggtgggatttccgtcatatttttggtaccagtacacaaaaagaccgtcattacaacacaccgcggacctggtttgctcaacgttaccttagtcctaatgcttcattaggccaacgtcccgaagattctgaaatgccatttattcgtaaggctgaatttaagattgctaatgaagacatccaatatgttctaaaatcgcattttaatgagacaccttacgatccaatgggggatgctcctgaacgtaagacttaccgagctatctctttatcacggacggcccaatcacatattttacaagtgcgcaatctgaataaatataaaacaagtattcattggattgaattaggggtcccagcctttaacccttatgttccattttttgctaatgctgacgatactgatgaatcgtatcgaaacgtaccggaaaaaatgaacttagagtctgcattctggttaaatgaagccttagcagaggttgttgaaagtcattatcaagaatttatggaaaaagatgaagactaccaaaaggagctaaatgaatgggcacgccgtaaaattgcgcaggttgataaagaagcagctagtcttgaaaggcaggcattaactgattatctaactgggcaaaatcatgaaatagctacccattataatgaacggacaaaggccctcttctttgaattattaactgaaggctgtgagctttcaaagatgtcatttaagatggatcctaacctttaagatattttgaatattgacatttctcactttattattaaaatataattaatgtaaaatgagagaaggataaaaaggagaattcaagcaaccgatgaacggcattatctagtagaagtttttacaaaattgggatttaaccaagatgacagtcaattattagcagacactctagttgatgcggatttacgcgggatctcatctcatgggattcaacgattagcatggtatcgtcggatgattaaagagggaacgattattccccaaaataaggtcaaaattattcgtgagttaccaggatccgtccttgttgacgctaatcaaaatatgggacagctcgcaacggttttagcgactcaaaaaataattgaaaaggctaagaaaacaggggtggcaattgctgttattcgcaattcgaatcacttcggcaccgctggttactatacaagattagcgttagaagctggattggtaggagttgcccttactaacactcgtcccctggtagtcccaactaatgctactcaggcttttcttgggtctaatgcttttgcgtttggctttcctgcttctccacatccatttatgtttgatggtgccacttgtgttgtttcaggtggaaaaattcaagttcatgctaaaaaaggcgaaccgttgccaggcgaatgggcagttgataaagatcggcaggtagtaactgatgcgcaagaggcagaagatattcttgccaccgcggcctttactgaaggggaacaaaaaggtggaggagttctcactcttggcggaaatgatgaggaaaattctaattataaggggatgggaaattctatcgtaattgaattattgacgggtattttagctcaaggctctatctctgccgatactgttagtggtaaacatgattttagtcaatttgtaatggttcttaatccagcattctttggtgatccagaggtattgaaagaaagatgccacatcaatgctagatcgaattcgccagcttgaacatattcctggtaaagaaatttgggtacccggtgatcgtgagtaccgtttattagcagaaaataaagaaaaaggtgtcacgattgatgaaaagacctatcaagaaatgaaagaaataggaactgaacttggtattgatgttccttaataattgataaactccttcaaatcctgataagtgaaagtggtacactgaatatatgaggaaaaaggagcattttaaatggaagatcgagaattagtaatgttttggctcgcaggtgatcataagttagcaattcgaaaggggcttacttcggcaattttagcgagtgaacttagaaaaaagggttataaggataaattaatagaagactttcttgatgattttgcacgtgacttaaaaaatgatcaaaaataggcaaaaaaactcccaacgttttactaaacgctgagagttttttagtagcacgataatctatcgttttatttatgaatacggcttagttgttaccttgtaactttgccataccgttcttagcaacttcttccaattgcttagcagagtcggccatagccttcttttcacggtcgttaagtggaacttcaataacctttgcaacaccagaagcattaacaacagctggagtaccgatgtaaaggtcgttaagtccgtattcaccgttcattggggcaccgatagggagaacagaattttcatcacgaagaatagcctttgaaatccgcattaaagcagtggcaacaccatagaaggtagcacctttgcggttaatgatttcgtatgccttgttacgaacatcatcttcaatcttaagtaattcatcttctgaaataccttcatccttagcgatgtcaagtaatggcttgccaccaacagtagcacttgagtaagcagcaaattcggaatcaccatgttcacccataatgttagcaataacatcacgagggtcaacatcaagcttcttaccaagagcaacccgaagacgtgcggaatcaagtgaagtacctgaaccaacaaccttgttcttagggaagccagaaagcttttgaacagcataggtaaggatgtcaactgggttagctgcaactaagaagattccgtcaaaaccagacttaacgattggttctacaacggacttaatgatcttcaagttcttatcaactaattgaagacgagtttcaccaggcttttgtggagcaccagcagtaataacaactaaatcagcgtctttgcaagtgtcgtaatctgctgagtagatgttcttaggagcggtgaaggcagtagcgtcttcaaggtccattgcgtccccttcagtccgttccttaataatatcaacgatagcaaattcttcagcaattccttgttgtgccattgcgaaggcgtaacttgaaccgacagcaccgtcaccaacaagaacaactttttgatgattcttagacataataaacagtctccctttcatcttatgtatacattatttgagatttctctcacagtaatgattataacattccgcagaaaaattactataagattttatagataaattagttagtgaataaacctgctcctaagataataactgctaaaaggatcgctggccaaagtaaaacatgaattaatgtcccgattaatagaataagaaggattagaccaatgaacttaaccgttaaacccccaatcttccatagcaaccagcagataagaatagcaattaagagactcactattgtaatcacctttccttaaagtatcgtgaacatagtatagcatttttttgaaaattaaagtttaaacatagattaaactttggaacgttggtgacctgtgctaaaatatacctatctagggagattaatttaaaattgatcaggaataataatagaggaggtggttaccattctgaatcgaactaagcagtttatgcgcgacaatgatttaatgtataaaaaagagtacattcggccaatgatgacaccccaacacgtatatgtgttccgctttggtaaacacagactaaataatcgggtaattgttcgttattcccatacttggaccggacgattaaaaattaacgagattgatgttcggttgcatcaccaacatcatccccgtattttcttgactgagtccgacttaatcgattacttaagtcatcatttagaaaaagaaaagaaacgtgaacaagaacgaccacatattagtaaagttgataatgaaaatgattagactttattaagttggtatttatcgtgaccatttacttttattgtggtcacgattttattatttaaggaggtcattaaatggattggacagcaataaaggtaataacttctagtgaggctgttgaagcagttagctatattttgacagatatgggagcacaaggcgttcaaattgaagatgctgctgattttgcaaacttacatgagggaaagtatggggaccacggtgaatttattgatccatcatcaattccgcaccgaaaaaatggcgcagcagtatctggatatttcccccaaaacgtatttgttcctgaactattgccaactatccatcaacgagtagcaaaattaagggattacggcctgaatccaggagaaaatgatgtctcagcagcgatcgtcgataatcaacaatgggcaacggtttggcaaaaatattatcacccattaagagtaacggatcagttaacgattgttccgcaatgggaagaatatgagccagcagatcctaaagaaaaattaatctttcttgatccaggaatggcctttggtaccgggactcatccaactactcgtttaatgctggaggcccttgaaaaaacagttgttggtaatgaatatgtaatcgatgtcgggacaggttctggtgttttaagtattgctgccaagcacttaggggcaggaaaagttgatgcttatgatattgatgaagtagcagtcaactcagcaaaaaagaatcttgcactaaacccggtcgctaaagatgttaaggttggcgtaaatagcctattagatgggatccatacccaggcagatttgattgttgctaatatgcttgcggaaatcatcgtacctcttattcctcaagcatatgaaaatcttaagccagatggcaaattccttgtttctggaattatcgatgataaggctccgttgattcgtcaaaagttgcaagagcaaggatttataattgacgatgaacagcagatgaaggactggcacggaatgattacccacaagccaatcgaggtgaaataaatgcaacgctattttgttaatgtaactccagctaatgaagtaacattgccatctgaagcagcccaccacttgttaaaggtaatgcgcgcagaggttggaacaagtgttgagcttgtattagccgaccactgtgtttaccttgcgactcttagtactacagaaccaacggcgacattaaaaatcaatcagaagttagatgctgatagtgaattgccagtttcggtaacgcttgcctgcggaattccaaagactaaagagaaaccagaattaattgttcaaaaggcaactgaattgggggcagacaaaattgttttcttcgatgctgctcgctccattagtcattggcagggaaataagcagaaacgaaagatcgaacgtctgcaaaaaatagctgaatcagcagcagaacaatcccatcgaaataaaattccgcaggttgaatacagtgcaaatcttgatcaattgttagccgattatcccgctaccaaacggatagttgcttgggaagaatcagctaaacagggtgaaacaagtgctttagcgcaacaatttaatgcccttaacccgggagactcgctccttgccatttttggtccagaaggtggattaacggaaaatgaaattgctaaaatgaatgaagctggcgtggtagcagcaggtttaggaccacgaattctacgaactgaaacagcgcctttatatttcatggcggctatctcatatgcaatggaattgtcataatgtagctggcttacttatggtaaaataaagaacagctttaatcggtgatttaaaactgaatataggtgttgaaagagaatgaattttatgaaaaaagcatgggaacgtttagataaaccattatggctagctagcattttaattgggattgtattgacgctcgttgttgataagcttccatttgttacgcgagtggtaatggtagagattgtcttaatccttattaatggtatttttagtatttggtccggttattggatttataagcaccagcgaaaatggggcgagttattcatttttccaatcctttacttgataactgcgtatttctttatgccccgatatacttattattttgcccttgcttacttagcgcttgcgtacttatcctgggcaatgcgtcaacaaaagtaattgaaaggaggtcgttcgatgtcaaaagaaaaggaattgacacatgaagatgttcaaaaaatagttagttcttatatgaatgaagaacacgttgctttagttgaaaaggcatatcattttgccgaggtagctcaccatgatcaacgacgtaaatctggggaaccgtatattattcatcctatccaagttgcggggatccttgctaatcttcatatggatcccgaaacagtttgtgcaggatatttacatgatattgtagaagatactggcgcaaccttagatgatattaaagaactctttggatcaaccattgcaatgatcgttgatggtgatacaaagcttggtaagattcgttacaaatcaaataaagaacaaatggctgctactcatcgtaaattattacttgcaatgtcaaaggatattcgggtaatgattgtcaagcttgcggaccgtcttcataatatgcgcactcttaagcatttgcgtcctgataagcagcgccgcatctcaaatgaaacccttgaaatttatgctccaattgcggatcgcttgggtatcagtactattaagtgggaactagaagatctatcattacggtacttaaatccgcaacaatattaccggattgtccatttaatgaattcacggcgcgatcagcgggttgactatattgatgagtcaattaagttgataaaaaaggcgattgcagatttggacttaggaccgaatgttgaaatttatggccggcctaaacatatttattctgtctaccgtaaaatggttactcagcataagcaatttagccaaatctatgatcttcttgcagttcgaattgtcgttgactcaatccgggactgctatgctgctcttggagcgatccatactaattggaaaccaatgcctggacggtttaaggattatattgcaatgcctaagactaacgggtaccaatccttgcatacaacaattattggaccggaaggacggccattagaagtacagattcgaactcacaagatgcatgaaattgctgaatatggggttgctgctcactgggcatataaagaaggaaagactaatggaatccaacaaactcaggatagccaaaagctaaatgtcgtcaaagaaatccttgaattacgaagtgaaagtcaaggcacagatgaatttatgcaggggattcagagcgatatatttactgataaggtctatgcattcacccctaaaggtgacgtaattgaaatgcctaagggatctggaccacttgatatggcttaccaaattcatactgaagttggtaatcatacaactggagctaaagtaaatggacggattgtaccccttgattatgagatcaaaaatggtgatattgttgatattttgacttcatcatcatcagctggtccgagtcgtgattggtttgatttggtttcaacgcggcgagctcgtaataagattcgccaattcttccgtgcacacgatcgagaaaagaacattgaagaaggaaaacaacttcttgaaaacgaactccgtgaagcaggatattcgccagcagaattaatgactgatgaaaaatgtgaggaagttgctcaagagactcattacaatagtagtgatgatatgtttgcggccctaggatttggtgacttggctcccgttggtattagaaatcgttttactgctgatatccgtcagcaagttgaaagcgaccgccaacaagcagcagaaaaagctgtactagaagatcaccagactcttgagaagccaaatgaacgtgaaaagcaaaaacaggctaaggcatcgagcgagggcgtaattgttgaaggagttgacaatcttcttgttcgtttaagtcattgctgtagtccaatcccaggagatgctattactggctacattacaaagggacggggagtatcggttcaccgggatgattgtccgaatattaaagctgcccgtaagaatggcgaacgaattgttagtgtatattgggcaaatcctaatggcgacaaaacaaactacaatgctgacttggaagttcagggatacaatcgaaatggcttgttaaatgatgttttacgttcagtaaataacagtactcgcttcttaaattcagttaacggaaaagttgaccataacaagatggtaacaattagtttgattatcggagtgcgtaatttacgacagttgcaattaatcatggatggtttaaaaaacattccagatgtttacgttgtcaaaagaattattcgataggaggatgcttgtgcgagtcgttttacaaaaagtaaatcatgcagcagtttcaattgatgatgaagttgttggtaaaattggccttggctattttctcttagtcggttttgctccagatgataccgaagaaaaattagactacttagtacataagattactaatcttcgtgtttttgaggatgaaaacggtaagatgaataaggggctacgggatgttaatggtgcaattttatcagtctcccaatttaccctttatgctgacactaagcatggaaatcgtcctggattttcacaggctgctcgtcctgagattgctgaaccgttatatgatctttttaatcaaaaactagctgctactggtattcctgttgaaaccggacattttggagccatgatgaaaattgatctggaaaatgatggccccacgacaattatttatgaacgctaaaaaagcaaagagggggctcgaaaaacgaagctagcctctgggagcccccgcaagcaacaataggcctctaatgttcggtttgccggacattagaggccattgttgtactgcgtatttgctttttatgaaagtaacttaacttatgtcacagtttagtattgacttaaaatttgatcgactgcgccaccatagctctcgccgaataagattaaatgcatgcataggtaatagaaacgataccatgaaaggcgttcctctaaatgatcatcaaagggaaagacgctgctatatgcctgataaaaactattatcgaaaccgccaaaaacagttgtcatagctaaatcaaattcacgatccccaaataatgcatctggatcgattaagtatggtttatgatcgccagcaaataagaagttaccggcccataaatcaccatgaagaagactagggatgacttcatggtgttggtagtaatcagtaaatttattaaccatttgttggtaatgttcttgtcgccatttattccatcggccacgttggcttgccacttgtacttctggttctaggcgctgattaatataaaaatcaagccagcttgaattccaagaattatcttttacgagggccttggtttgatgattatccataaagccgaattcttcattatgctgttggtgcattttggcaactgctaatcccaggtcggcctgattaccccaagtttcatcaagccagtttaaaattaaataggcattcccatcgatttcaccatggtaaagtggggttggggtattaatgaccttaccgatagctttgagaccattaatttcatgactgaaataatcttgtgaatggttaggttggacctttataaagtacctatttccatcagtagttgtggtttgatatgctaaattaatatcaccaccactgactggtttaacagaagtgagattttttaatggaaggcgcttaaaccatgctgtatttggactttccaattgatgtccctcctttactaaattactttatttataccatttttaggcaagtattgttaaataaagttgatttataaggcactaattaacgttagtgtaagattttcataggttggatgaataattcatctggtcgtggaaatcttttttgtagaccaatttacttatttacaaaaaaagaaaagaccagtagcctttagtgtgtcgaatactaagcaaaggcaggtctttcctcatggatattttaacagaaatcgagcagaatttggtgaaatcaggtagtttatttgaagctgaacagattattttaaaaggggtattggagttaggacaagtaatcatgcaaaactttttggaaagcttagatcgaagcttaaagtcccaagctccagcgaactatcaagtaatcaataaacagccacggacgcttaactttatctttggcccggtgacttttcaacgacggtattatcaggctgggacaaagaaacgtgaattttacttagaccaacaattaaaaattaaaccacgtcgtcgtttatcgccacactacttaatgatgatggctaagattgcccaaacaactacaatgcgcaatactgccgacattttgaaccttgtatttgacagcggaattactaccgattcggtaatgcacgccgtgcatgagttaggaaatcaggtagctaaacaaactcaagcaaaagaacaccaagctactcctcgccatatgcctaaaaatttaactattgagggtgatgcttttatgattaaaggcaaaaaagaagcaggtcagctgactcttgtgcaccattatagggtttatgagcgagtagctaatcaaatcattaatcggcatgactttctcagtgttgggcaccaaggacggcttgaagcacgactaagtgattatttagaccgccattataagcttgccggtcaaacgatctttttggtcagtgacgctggcccaggttacgaaccagctaagctattaagtctagttcctcaaggtgcacatggtgaatactttctcgaccgctatcattgtttacagaaaattgaacatactttaggccggcacaacgaattagccatgcgagcaattaaagccgttcgtcatcatgatcaagcagagctaacaataattttagatacttatgaatcacaaaacctaacggaaaaacaagcagacgacctaatgcgtttaagaaagtatctacagcgaaattggcggtatatcctctcaccacaaatgcgtggatttaaggatattcatttaattggttcagtcgaaagttctcaccgggcttttacttaccggatgaagaaacagggcaagtcatggactgagcagggggctaaagccatgattggtttaattgaagcccgaatgaatggtgaactgcaagctagtttaaatacaatcctagaacaattaacagttcatcctcgagtggctcaaaccagcctattacaggaaatgcatattcgaactggagagtttctaagaaaagcaccgacaaagccgtcaattggagcagtacaaggaataattccgattaacacggccacaagtagaccaatgggacaactttttaaggcactaacccactaaaactgtatatttaaaggctacctatgaaaacttgacagatacctaattaaccttagtattgacatttatgaggggatcgagtaaggtaaaaatgtaaattaaagatattaatagctgttgataaagaatgctcgggtacttgaaattatcagcgattggagaaaggtgagagctccaaatattttggcctcgattgacacttttgaagctgggcaatatgctccgtcgtttagacgttatttttgagtgataccaaggtggtaccgtgcatttgcacccttgtaatttcaagggtgctttttatttaaactgttattaaaaactgaaagaggtaagcggagaatgaagagaacaaattatgctggggatacaaatgaacagcaagttggacaagaagttgtcttaaagggttgggtagctaagcgtcgtaacctaggtggacttatctttattgatttatgggatcgggaaggaattgttcaactagtattcaacgaaaaagaaaatccagaagcatttgaaatcgcaaatgcggttcgtaaccaatatgttcttgaggttcaaggaaaagttcaattacgggcagaaaaagaaattaatccagatatgaagactggaaaagttgaagtagccgttgataaggttaaggtattagcaaaatcagaaacaacgccatttgatattactgatggtgttgatgcttctgaagacttacggatgaagtaccgttaccttgatttacggcgcccagaaatgatgcgtaatttgaagttgcggagtaaggttgcttcgattgtgcacaattactatgataatgaaggctttatggatgttgaaacccctgatttaacacggtcaacaccagaaggagcacgtgactacattgttccatcacgtgtttaccccggtcatttctatgctttaccacaatcaccacaattatttaagcaattgttaatggcagccggagttgataagtactatcaattagcacgttgtttccgggatgaagaccttcgtggtgaccgtcaaccagaatttacgcaaatcgatactgaaatgagttttgcaactcctgaagacatccaaacagttacagaaggtttaattaagcgggtaatgaaggaaatcgtgggggtagatgttaagactccattcccacggatggaatggcaagaagccatggacaagtacggttccgataagccggatactcgttttgggatgttgattcatgatctttctgatattgtaaaagacagttcatttaaggtttttgctaatactgttgctgatggtaactatgttcgtgcaattcgcgttcctggtggagcagataagtattcccggaaagatatttctaagtatgaagaatacattaagcgttttggtgcaaagggacttgcatgggttaaggtaactgctgatggttacaatggtccagttgctaagttcttaaatgatcaagttgcccaaatcaatgaagaaatggatgccaaagaaggggacttaatcctctttgttgctggtagtttccacgttgtatcagattcacttggctaccttcgtcgtacaatcgctgaagagctagatatgattaagcctgaccaatggaactacttatgggttgttaattggccaatgtttgaatatgatgaaggctttggaaagtggattgccgctcaccacccatttacaatgctaaatgaagaagacttacattatcttgaagatggggaagatcctcataaagctcatgctcaaagttacgatattatcttgaatggtaacgagatcggtgggggatcaattcgtatccacgatccaaagattcaagaaaaagttctcaaagctcttggatatacaaaggaacgtgcagaggctcgctttggattcttacttaaggccttaacaatgggaatgccacctgagggaggacttgcctttggtttggaccgatgggttatgttactagctcaagctgatagtattcgggatgttattccattccctaagaactcgaaggcagttgaaccattaacggcagctccaggcaaagttagtgaacaacaacttgatgatcttaaaattgaatttgatgaaaaaattgattacaagctcgatcaagatccagatgagcaataaataaaacaaaaataatcctcgtgaaaaggtacttgaagtgtactgttcacgaggattattttatttcaaaatcttcttcaaaaagtcttgtgcccgggggctagtagggtgggcaaaaaattcctctggatctccagtttcctgaatatacccatctgccatgaaccagatttggtctgctacttcacgagcaaaccccatctcatgagtaacaaccaccattgtcattcccgattcagctaaatcgcgcattacttttagtacctcatcaaccatttcaggatcaagggcactcgttggttcgtcaaagagcattactgctggactcatcgcaagggcccgggcaattgcaacccgttgtttttgccctcctgatagttgatccggatattgttgagccttatcgcttaaaccaactttttctagtagttccattgcagttttagttgcttctttttcattgatatttttaactttaactggtgcaattgtgatatttttaaggactgtcatattaggaaaaagattgaagctttgaaaaaccattcccatcttttctcgcaattggtcgagttttttatcacttaagccaatcagattctgtccttcaaaaagaacttgtccgcttgttggttgttcgagtgcatttaagcagcggagaaaagtacttttacctgctcctgaagggccaatcacacaaattacttggcccttatcaacatgttcggaaatatcttttaagacaatattatttttgaattttttctgtaaatttttaatttcaatcattttagtgggcatgtttcattctcccttcaaagtaaagcaaaatcctggatagtgtaaatgtgaggataaagtagatgatcattgtgatgaataaaggtaaaactcctttataagttgctgattgaactaattgtgtttgatacatcaattcggaaacaccaatcacagaaactaatgaactatcttttaataaagtaataagctcatttcctaatgctggccaaatatttttaagtgcttggggcataatcacatatctgaatgtttcgcttttactcatccccaagcttcgagcagcttctgtttgtccaagtggaatggattggatcccagaacgaataatttcagcaacgtaggcaccggaatttagtgaaacggcaataatcccagcgaggagagccggaagtgattgaataattgcgccaatcccaaagtaaacaaacattatttgaaccatcattggcgtaccccgaagaaattcaatgtagcaaacagcaattgaatgtaagaatttgttctttgaaagccgcattagtgcaaagagagttcctaataggaaaccaaaaataacagagacaactgtaatgattaatgtatatttaatccctttagcaaagtaacgccaatagctaagaacagtattttgttttttatagctcttcatatactgtgaggcttcaggaatccattttttattaattagttgttctttattaacttttttaattgtctggttggcggcattgactaacgaggtatcacctttaggaaaggccatggcaattccgccagcagtatttggcaatttcgaattaaaggcataaagatttgaattattggcagcgtaggctttagcagttgcagcatccattaaaatcccatcgtatttatgagattgaagcccaatgactaaggaagaaagtttagcaagccctttgccgtttgctttaggcatttcctttgaaattagggttgattggagcgtaccgttttgtgctcccacatttttcccattaaaacttttgacattaactagcttatctttatctcctttattaattaaaaagtaactatcaccggaataatatgtatttgagaagtcaacgctcttttttcgttcagccgtaacgttcattcccgaaataatagcatcaattttacctgtttctagcgcaactagaagtgagtcaaagtccatgtttttaataactagttttactcctaagtctttagcaaattgtttagcaagggaaacttcaaaaccgacatatttagtttttccattttctttggttgtgaattcgtagggtggataatcagcactcattcccacaaccaatgttcctttttgtttaatcttttgcactgaatcattgctagcgacttgcgatggattattggttgatgaagagctagttgaactgctctcgttagcagctaatgcagtaataggtgtacataatatcggaaacgcaattaccattagcagtaataaatgtttaaaacctttcatagttaataactcctttgagaatagtaagattaaattgttactaaatatacacttaaatgtttatttatgcaatagaaaatctatgaaaagaataaatattcatatatttgtataataattaaaagcggttacttagtttatggagtagtcaaagaataggtggataagaaatttaaatttttatttaaaagtaatgttgacagggtaggccatgttgggtaaaataatttttgtagtgaaaaggaagcagtatgcctgctacctcgatacgtaactttaagctcggagggagggatcaacatgtcaaaaacagtcgttcgtaagaatgaatctttagacgacgctcttcgacgctttaaacgttcagtttcacgtaacggaacattgcaagaatatcgtaaacgtgaattttacgaaaagccaagtgtaaaacgcaagttgaaatctgaagcggcacggaagcgtaagaataagcgcggtcgtcgttactaaaaatgtgtgctctcacctgttgcctggtgagagcttttttatatgaaagaaggataaataatgagcttactacaacaattaacgtcagacatggtatcagcaatgaagaatcgtgataaggaaacattaaacgttgtccggatgcttaaagcagcagttcaaaatgaacaaattgaacttggccacgatttgagcgctaatgaagaaattgcggtaatagcacgtgaatataaacagcgtaaagaatcgcttgaagaatttgaaaaagctggacgagaagatctgatcaaccaagctaaaaatgaattagcaattgttgaaaagtatatgccaaagcagttatcaaaagatgaagttactaagattgttaaggaagtaattgatgagcttaatgcttctagtatgaagaacttcggacaagtaatggggtcagttatgcccaaagttcaaggtcaagcagatggaaaattagttaaccaggttgtaaaagaacaattgagtaagtaatattagctgtaaaacaacctaagattagttcaggacaaaaataattattgtcctggacttttttgttattctgaagatagagctaagatcgatcatgctcccagggacttcgagtccgtattataaaatgatctccgctatctttgatttgatattttgcttttaggttgtggaactacgagttcgagtatttaggaaatgaagtacaaatctaggatagcggttatatctagctctatttataaaaaggaagtctttttatgtctgatatatttgccttggatgtttcaatgaggaaaagctactgtgtctggtatcgagggaaacactgtttaaaggagttttctttagtacacacgaaagcggggtttaatgctctacgagatatgattaaaaaagctcagaagccaattatctactttgaagcgactggaatttattcgcgagtaattggacatttctgtgagactaatggtctccgcttttgccgtcttaatccactagaacttcatttaaagtccgagagtctacgacgagttaagaccgatcagaaagacgctcatcggattgcgctcactgtccaggaaaatgcttttcgattaacagttccttggaaaaaagactatcttcagttacatgagcttagtcggttttataatcagctcaatgctgattggaactatcgtctaaatcatcttcatactgcacttgaacaagtttttccagaacttaagcaattatttgtaaatagaacatctaaattagcgttgaatatcgtggagctttttcctcatccagcactagttaggccttattcgagagttaaattaaagaatattctaatggcctctacagataaacgaatatctaagatgaaagcttataagtatgccgatcgattaatcgatctcgcccaaaaatcatatccggctgtttctggtgataccattcaggttgatgaagttcgctactacgctcgccaattaattgccttaacccgtaaaaaggaagaggtcatcaagcggatggaatctattgcccagcgcttaccagagtatatcctatactgctcttttccgggaattgggaaacaaactgcggctcagttaatgggagaattgggcgacattagtcgctttgacaatgctaatcagcttaatgcctttgttggaattgatattcgtcgttaccaatctggaacctatttaggtcaagatcatattaataagcgtggaaacccgattgcccgtaagctcttatattttactgtaggtaatatgatccgccaacaacacgctaattctaatcatattgttgactattactatcgtttaaaagaaaaacgacctcgtccaaaactgaacaaggtcgccatggtagcttgtatgaataaaactctgaaatgtctcttatccatgattaagcaccataaaaaataccactatcggtatacggactcaatagtccctgtgaaggcataaccacctcacaattttaatataccactaattctcgatttttgaagaagaaccgggttggtttagtatactcttcttttctaaatatttttcttgactaatcgtaggaaagggagcgagacagaagtcacttgtgacttcgtttttcgatgcgaagctagcctctgggagcccccgcaagcaacaataggcctctaacgatcggttttgccggacgttagaggccattgttgtactgcgtatttgctttttatgaaagtaacttaacttatgtcacagtccctttttactgtacatttttactttttaaactagaattaaggcatattcaaaagaaaaggggcatttatatgtgcacatcagtaatttatacagcaggtgattattactttggccgtaaccttgatttggaagttaatcttggtcaagaagtagtgattactccacgtaataagactttagaatttcgggaaatgccaaaccttgaacaccattatgcaattattggaatgtcgattgttcgtgatgattatccattatattttgatggggtaaatgaaaagggtgttggaatggcaggccttaattttgatggtccagctcattatttcccagttcaagaaggaaaagataatattgcatcatttgaattagttccttatattcttgcggctgcttcctcggttgctgaagcgaagaagttactttcaaatgcaaacattgctaatatcaatttttctgataaactccaagctgcaccgctgcactggattattgctgataaaacgggggcttctgtgactgttgaatccaccgcaaaaggattgaatgtttatgataacccagttggtgttttgacaaataatccggagtttcctcgtcaattattaaatcttagtaactatcgtagtgttgcacctgctaatccggctaacgtatttgcacctaatgtcgacctaccagtttatagccggggcttagggacccattttctcccgggaggaatggattctgaaagtcgttttgttaaggctacattcactaagatgcatgccccagttggtaattctgaagttgagaacattaccaactatttccacattcttcaatctgtcgaacaacaaaagggattggatgaagtagcaccggatacttttgaatatacgatttactctgatggttcaaacctaaagaagggtattttttactacaagacttacgaaaacagtcaaattaatgcagttgatatgcataaggaagaccttgaagcatcagaattaattacctatccagttcaaaataaacaaattattaaccaacaaaattaaataattattctatctctaaactctttttatgcatgaacaacttatattttatgcataaaaagatattttttgaaaaaatatgctaaaactattgatttttattcataatactcgtatatttataaacaacgaatttcaaatgagatggaggacgagattatgtcaaaagaaaaaattgttttagcttattctggtggtttagatacttcagttgcaattgcatggctcaaaaataaggggtatgacgtaattgcatgttgtattgatgtgggtgaaggaaaagaccttgaagcgattaaggaaaagggtcttcaagttggtgcgtggaagtcagtagtgattgatgccaagcgggactttgctgaacaatttgtattaccagcccttcaagcccatgcaatgtatgagcaaaagtacccattagtttcagcactttctcgtccattaatcgttcaaaaactagttgcagttgctaatcaatacggtgcgactgctattgcccatggttgtactggaaagggaaatgatcaggttcggtttgaagcaggtattcatgctttagcaccagatatgaagattgaagatccaattcgggattggcactggtcacgggaagaagaaattcaatacgctaaggataatggcattcctgttccaatcacaaaggctagtccttattccattgatgagaacttatggggccgggcaaatgaatgtggaattcttgaagatccatgggctgcggcacctgctgatgcatatgatcggacagtttcaattgaagaagcccctgataccccaaccacaattgaaattgcctttagtgaaggggttcctacagcaattgatggtgaagaaatgccgcttgaccagttaattatgaaactggacaaattagctggtagtcatgggattggtcggattgatcacgttgaaaaccgacttgttggtattaagtcacgggaaatttatgaatgcccagctgcaactgttttattggcagcccataaagacttggaagacctgacccaagaacgggaagtagcgcactttaaacccctaattgaacaaaaaatgagtgaaattatttataatgggctttggtattcaccattaatgaaatctttagttgcttttattgatgaatcacaagcagttgttaatggagtggtaagggttaaattatttaagggaaatgtaatctgtgaaggtcggaaatcaccaaattcactttatgataagaacttggcaacttacacttccgctgatgaatttgaccaagaagctgccactggctttattaaactttgggaattaccagataaggtctatgctcaagtacaaaacaaaaataaaaagaaagtaaaggagaatacaagcgatgcctattaagagaatgtggggtggacggtttgaagaagccggtgaccaactagttaaccaatttaatgcgtcaatcagttttgatcaagaaatggctcaagaagatattgaaggctcattagcccatgtaaaaatgctgaaagaaacacaaattttatcagcagatgatgctgataagattattgctggacttaagaagttacgtgagcgattaactagtgaaggcctcccattttcgattgacaatgaagacattcatatgaatattgaggcattgctgacagaagaaattggccccgttgctggtaagcttcatactgggcggagcagaaatgatcaagttgcaactgaccttcatttatatgtaaagaagcggttgcccattatcattaatgaattgaaaaacttacaggcagaattagtagataaagcagcaaaaaatgttgaaacgattatgccagggtacactcatatgcaacatgctcagccaatttcgtatgggcactatctcatggcttatttccaaatgtttcagcgagatgttgaacgttttgaatttaaccagcagcacacggatttatcacccctaggagcggctgctttagctgggaccactttcccaattgatcgacaattaagtgcaaagtatttaggttttgctgaaccataccataattcactggacgccgtttctgatcgggattttgcccttgaatttttaagtaacgcaagtattttgatgatgcacttgtcacgattatgtgaagaactgatttattggtgtagttatgaatttggctatttagaattggcagattcatattctactggtagttcgattatgccccaaaagaagaaccctgatatggcagaattgattcgtggtaaagttgggcgagtttatggtgatcttttcggcttattaacgacaatgaagggacttccgcttgcttataacaaggatatgcaagaagataaggaaggattattcgacgcggtaaagacgattctcccaagcatcaagatcatgaccgggatgattgccacccttcaagtaaagaaagaagccatggagcatgcaactcatcatgacttttctaatgccactgaattagcagattatctcgctactaaaggaattccgtttagggaagcgcatgagattgtcggtgagctagtactgaagggacttaagacagggacaaatcttgttgatattccattagacgaatataaaaagatttcgcccaaaattgaagaagatgtttatacctgcttacaacctaaagtagcagttgaacggcggaattcttatggtggaactggttttgatcaagtttgtcaacaaattagagatgctaagaaaattttagaaggtaattaatttccacgatatcgtaacaatattcgtaaaaagaggctatcgaaagtgattagcctcaatttttttactcaatagtaacccttatattgaatcgaggtttactattgaatataattaatgcaaaaagaaaggatttacgctgatgattagggaaaagataagtttatcaatttatgaaatgactgtcgttgccatgatgattgcaattattgttattttaggagcagtcccgggaattccggtgggggttattccggtgccaattgttttacaaaatatgggaataataattgctggagaattacttggaccaagattaggaacatttgctgtatggctcttcttgtttttagttgtgcttggattgccactgctttctggtggacgcggtggaatggtgacaatattaggtccaactggcggatatatttttgcttggttatttgtcccattgttgattggttttagtctaaaattaagttggcattatgggatgacacaggggataactgaatttctaattgtttggctatggggtgtaatctttgtggaaggagtcggcgcaatctggttagctaatcaattacataccacgcttatttctgccttggcttccaatgttttatttgtttttggcgatacaatcaaagcgcttattgccgtctcaattactcgccgtttacgacacattaaggttttttgttaagaagatggttagaatggttcattcgacggcacagaaaattttatggcaattactttcagcaccagattcatggatttctggaaatgatttagcaaagcgatttaatattagtcgtgaatctgtttggaaggccatcaacggtttacgaaaaaacggaaataatattgaaagtcgtagaaaccttggataccgttttaccggaaattcaaggttgagtgctgatattattgatttttatactcataatcactttaagaatcgtctttacgttgaaaatcaggttagttcaactcaaagcatcgcgaaagcttttttgagtcaccaccaagttagtgcgccaacggtatttatcgctgatcatcaaactgctggctatggaagacagggacggtccttttactctccggcagcaactggcttgtactttagtatgattctgcctagcccaaccgacagaccactacaagctgggttaatgacaacgacttttgcagttttaattgtggaagttcttaaacaatttttccctgctcaagactttcggtacaaatgggtcaacgatatttatttaaaccataaaaaagtcggtggaattttgaccgaggcagtagtagaccttgaattaagaacaacggcatccttagtggtaggaattggtttgaatataactacaaaagaatttccgctgggccttaaaaataaagcgacaggaatagcaccagcagatcgtaatcttttagtcagccgtcttattgagacgattgctaataattatttagactatgataatccacagtatcttgagcaatatcgccaagactcaatgattttaggacagaaggtggacttggtagtaaatggtgaggttattgctggaactgctaaaaaaatcgaaaatgatggtgcgttaacaattcgcctggcagacggaaaaacgaaaacttttaatagtggggaagtagttaaagttaattttgaaaaataacttagatcccttagaaaagcttgcagtgatgaggttaaaggtgatctatgatataattatcattaaataaaatctgctaaattaaaggagattgtataggtgggagaacaaaaaacgattgaacaaacttttcaaattgaaagtccagaaatagaagttggcttactaggaacacaggataagtttgtgagcctgattgaacaaggaatggatgttgaaatccgaccattcggtgaaaatcttaaagtaagtggacaagaagaagacgttaaacttacgatcgatgtatttcgtgcccttatttcgttgctaaaccaagggatccgcatccacagtacagatattgttagtgcgatgaagatggcgcatcgtggaacactggaatattttgctgacctctacagtgaaacgattattaaagatcgccggggaagagccattcgggtaaaaaattttggtcagcggcagtatgttaacgcaatgaagcataatgatattacgtttgggattggccctgccggaacagggaaaacttacctagcagtcgcaatggccgtggcatccttaaagcgtggcgaagtggaacggattatcttgacgcgaccagcagttgaagctggtgaaagtctaggattcttacccggtgaccttcgtgaaaaagtagatccttatttacgaccaatttatgatgccttaaatgatatttttggggctgatcatacacagcggttaatcgatcgaggaattatcgaaattgcaccccttgcttatatgcgtggacgaactcttgatggagcttttgtaattttagatgaagcccaaaatacgactaatgcccagatgaagatgttccttacccgtttaggatttggctcaaaaatggttattaatggtgatgtttcacaaattgaccttccacatgggactcgcagtggtcttgtaaacgcgcaacgaattttgaataatattaagtcaattaagtttgttaaatttagtgcagaagatgttgttcgtcacccggttgtagcacggattattactgcttatgaggaccaaacatcaaagcgattagcagaaaaagataaagataaagagacaaaagaggaaaaatgatggacttggaaattttcgatcaaacaacagcacagcttccaaatgaacaattggagatggtaagggacttattacagtatgctgctaaagaactttccttatcagaaaatacagaaatgtctttaacgtttgtaaataatccagagataaaaaaattaaatgcccagtatcgtaatgttgaccgggcaactgatgttttaagttttgccgcagaagaagcgggagatgaaacaccaattattatggatccccaaatggccgctgaaatccctgttaatcttggtgacttatttatttccatcgataaggtagcagaacaagcaaagtttttgggccattcagttgatcgagagttaggatttttagctgttcatggttttcttcacttaaatggatatgatcatgaagagccggcagatgaagaaaaaatgtttaaattacaacgggagatactagacggttatggactcacgcgataaacatcaaactgagaaaaatcatcacttaattcaagcaatgtgtcacgcaatcgatggaattatccaagtattacgtgaagagcgtaatatgcggtatcatcttttagctgcctgcttggccattattatgtcggccttattgcagatttcagcaatggaatggttatggattttattagcaatctttgttgtttttacatctgaatttcttaatacggttaccgaagctgttacagatttgattgttgatcaccattatgaattaaatgtaaaaaaagctaaagatgttgctgctggtggcgtactgatttcagcgatattttcggttttggtgggtctaattatttttattccccgtatattagcaattattagataggaagttttaatatggataatcccaattataagtctggctttgtggcaattattgggcgcccaaacgttggaaaatcaactttattgaattatgttgtcgggcaaaaggtagcaattatgagtaatgttgcacagacaacgcgtaataagattcaaggaatttatacaagcccagaagcacagattacttttattgatacgccaggaattcataaaccatctactaaattaggtgatttcatggaaaaatcagcaatgtcagcattagatgaagtggatgctgtcttatttgttgttagtgcgactgagaagcgcggccctggtgatgactttattattgaacgcttaaagaaagttaatcagccaatctttttagttgttaataagatcgatcaaatcaatcccaatgatctgcctgaaattgttgatcagtataaagatacccttccatttaaggggattgtaccaatttcggctttgcagggaaataatgtgaataacttaatcaatgatattattaagattcttcccaatggtccgcaatactacccagccgatcaagtaagtgaccaccctgaacgttttgtgattgcagaaatgatccgtgaaaaggtctttttgctgacgagacaagaagtgccgcattcagtagctgttgatgtaacatcgataaagcgtgaggatgaaaatcatattcatatctcggccaatattattgttgaacgtcctggccaaaagggaattattattggtaaaggtggaaaaatgctgaaaaagattgggacaatggcccggcaagatattgaaaaattacttggtgacaaagtatttcttcaactatgggtaaaagttgttcctgactggcgtgataagtctgcaatgctaaaagactatggttatcggaataaagactattaaaaggatgatggttacatggcacgcgtaaccacacaatttactgggatcattatgtaccgacaggattatcgtgaacgcgacctattagtaaaaatgctcactgataagattgggccggcaatgttttttgtaaaaaatgctaaaaaacgtggctttcggatgactgctgatatcctgccattcacccatggtacatacattggctcgcttgatgaaaatggcttaagttttattaatacagcaagtgatactagccaatacaagaatattgcaagtgacattagcaaaaatgcatatgttacgtatattttggcattagttgacagtgcttttaatgacggtcgaagtattggtggctggtttaatcaagttgctgcagccttagacttaatcgaaaaaggattagatgagcaaataattacaaatattattgaaacacagctgttagttgcttttggtgtagcaccaatttgggatcggtgtgttgtttgtggccgcaatgatctggctttagacttctctgaacaatatggagggatgctttgtcagaatcactggtcacttgatgaacatcgtcttcaccttgaccgtaaaactgtttattatctccaacagtttgccacaattaacttgcagaaattgaattctattcggattaatccagctactaaacgacgtctccaacaagtcttggatactctttatgataacgaggttggactaaacttgaaggcaaaacggttcattagacaaatgattaagtgggaacaaaatatcggaaagttatcaatgaacgattgacatttgtaaaatatttttctattataagagcgtgtttaattgaatattggcaatgacagagattatggataaaccaaatcagcgatcaggggatagtgcaagccttgtagtttatttatccttggcactctaacagccgcttaaactaagctgttttacagagatgtaaaaaagtagggtggaaccgcgattaacttcgtccctacagtatcaattatttgatactgtagggactttttcattgaaaggagaagtaaagtatgacgaaaaaattaaccgtgcaagatattatctttacattggaacaatattgggcagatcaaggctgtatgttgatgcaggcttatgataacgaaaagggtgcggggacaatgagtccttacactttcttgcgggcaattggtcctgaaccatggaatgtggcttatgttgaaccttcacggcggccagctgatggtcgttatggtgaaaacccaaaccggctttaccaacaccaccaattccaggtattaatgaagccttctcctgataatattcaagaattatacttaggaagtttgaaaaagttagggattgatcctttagagcatgatatccggtttgttgaagataactgggaaaacccttcaatgggctgtgccggtgttggttgggaagtttggcttgatggaatggaagttactcaatttacttacttccaagtcgttggagagttgccaatgagcccagtggccgccgaagttacttatggacttgaacggttggctgaatatattcaaaatgttgactcggtttatgacttagagtgggcggatgatgttctgtatggtgatatcttccaagaacctgaatatgaacattctaagtatgcgtttgaagaaagtaaccaagatatgcttctacaagactttaatgattacgaaaaagaagctaaacgtttaattaagcttggattagttcacccagcttatgattatgttttaaagtgtagtcatacctttaacttgttagatgcgcgtggtgctgtttcggttaccgaacgtgctggttaccttcaccgtattcgaattatggcaaaatcaattgcaaaagcctttgttgaagagcggcgtaaacgtggcttcccactgattcatgacgaagcagttcgccaaaagacagttgaagaatatacaaaaaaagcggaaaaagcaaaggaacgggccgcaaagcaagcagctaagaaagcacaaaagggggaaaagtaagatggcaaatacatacttattagaagtcggtgttgaagaaatgcctgctcacgttgtaacaccaagtattaaacagttacacgaacgagtagaaaagtaccttaaagaacaacggattacttttgatgatattcaagaattcgctactccacgacggatggcattactaatccatggcttaagtgataagcaacctgatattgatgaatcagttaagggccctgcaaaaaagattgcgcaagatgctgatggtaattggaccaaagctgcaattggttttacccggggacaaggtgcctctgttgaagatattgaattcaaagaagtaaaaggcgttgaatatgtttttgttgaaaagcatattgctggaaaaactgttgctgaagttcttcaaggattaccagcagttattacttcgatgacattcccaaccttgatgaagtggggctacaataacttgcaatttattcgtccgattcggtggctagtttcattattaaatgatgaagtcgttccatttaatattttggacgttgaagctggtcgagaaacacaaggtcaccggttcttaggccatccagttaaaattgctaaggctgatgattatgaggaaaccttaaataatgatttcgttattgctgatcaaacaaagcgaaagaatttaattaaggatcaaattactaagattattaatgagaacaactggcaagttgattgggatgaggacttactagaagaagttaataacctagttgaatggccaactgcctttgctggatcttttgatgagaagtacttagcattacctgacccggtcctaattacctccatgaaggataaccaacgattcttctgtgtacgggataaagatggtaacctcttatcgcactttatttctgttcgcaacggtaacacagactaccttgataatgttattaaaggaaatgaacgggttcttgttcctcgtcttgaagatgctcaattcttctatcaagaagatcagaagttgacaattgatgaatatgtggaacgacttaagaaagttagcttccatgataagattagttcaatgtatgacaaaatgcagcgggtcgcagtgattgcgaatgttcttggtaagcaactaaatctttcagatgaagaactagtagaccttgatcgagcagcacatatttataaatttgaccttactacgcaaatggtgggtgaattcgcagagttgcaaggaattatgggtgaaatttatgctaagctattcggtgaaaaagatgatgttgccacagctattcgtgaacactacatgccaatctctgcagaaggagaattgccacaaactaagattggcgcggtcttagcaattgccgataaacttgacagtatcatgagcttctttgcagttgatatgattccaagcggttcaaatgacccttatgctttacgtcggcaggcatttggaattgtccggatcatcgccgatcgtggttggaaccttccattattaagtattcaatcagaaattgcccctgcctttgaaaacgctgaaatcaatgtttcttttgatttgaataaaaatagtgatgaagtccgttcgttcttcttggaccggattaagcaattattccatggtcaaaaggttcgtcacgatatcattgatgcagctaccgatactcgtcaaaatgatattgctaatatccttgaagctattcaaactattgatgatcataaggatgatgataactttaaagaagatattgaagctcttacccgggtattacggattgcaaagaaggataaacgtccagttagtgagcttgtagtagatcctaatttatttgagaacccatctgaggctaagatgcatactgctgtttcagaattgattaaggaaaatcaacagacagtaagtgaaaactttgcagccttacggactttaacaccaataattagtgaatattttgatgaaaatatgattatggataagaatgaagatattcgtaataatcgtttggcccaattaagtattttggctaatcaagcatcattaattggtaacttggataacttgattgtaaaataagacgttttaattgtattgctgctaacttgtggtattatagatactagttaaatgtaaaaataggtggaggtcgcattccgttaggttgcgacctttcatttcgttgctgttcgcttactaagtgaggtggatcaatggcaaagataccgcgtaatgtaattgatgaaatacgaaattcagttgatattggtgatgtaattgggcgctatgtccaactgcatcaggctggaaaaaatctaattgggttatgtccctttcatgatgaaaagaccccctctttttcggtgaatgaggaaaaacaatttttctattgttttggatgtcaccggagcggaaatgtatttcaatttttgatggagttaaagcatatcgattttgtcgatgcagttaaggagatcgctaacgatagtaatatcaagattcctgaacaatatgttagcgttccggctaaaccattaaataacgagaatcgacagctgtttgatcttcatgataaagcggctaaactttatcaccatatattggtaaatacaccggctgggcaagttgcacttaattatttaaaaaaacggggaatgagtgaggagctgattgaacaatttggtttaggctatgctcctgatcagcgaatcttgaagcctttcttccaacagcaaaaagttgattaccaattgctaagaaaaagtggactttttagtgaagatcaacaaggagagttgcgagaccggtttattgaacggataatgtatccaataaaaaatggtcaagggcaggtaattgctttttctgggcgattaattgataccagtaaaacaaatttacccaaatatttaaatagtcctgagacaccgattttcaataaacggcgaacattatttaattttgatgttgcacgaaaagcggcacgtaaagatggtcgattatacttatttgagggatttatggatgtaatctcggcctttgctgcagggatcgaaaatggaatcgcttcaatgggaactagttttaccgaagagcaagtagcgattattggtcgagcaactaggcaattagacatttgctacgatggagatcaaccgggacaaaatgcaattgaccgtgcaattagcctcgttaatgatcatcgacctaatcagttgcaggtaaaggttgtccaattgccggctgggatcgatccagatgaatatgttcaaaagtatggaccacagcaattcaatgcctatcttacgaataaggaagaaacaacaacagaattttacctgcactttttaagaaatgggaaaaatttagataatcagaatgaactaatgcaatatcttaaccaagcgctgaaggtaattgctcaggttcaagctcccttagaagaagatatgtacttgcaacggttggcaggtgagttcaagttagatcgacaaaccttaaaaacgcagttagatcaattgcgacaacaactaggaattcataatcagccatggattaagcaacagccttcactagctcgtcatcaacagtttcaacaaactagtgaagaagaacagcaaaaaattaaacttagtaggactgaattagcggaacagatcttattaaggtacatgctatatgatcgtgaagtatggatgcatgtgacagcagatcacaattttcattttgcacatgagaaatatcaaactttgtatttattagcagcaagttatttttctgaaaatggctcgtattcaactgctgactttcttgattatttagatgaaagtagtttacaaggtactcttgggcaaattgagaatttaaatgttgaccaagaagttgatatgcgagcaattgatgattgtatccatatgatcgtagaacaaacaccgttagctgcgcaaattgcagataagcaagcccagttaaaagaagctaattcattgcataatacagaattagctacgcaattaacgattgaactggtaaaattattaaagcagcagcaacgcttaaaaacggaggagactaattaatatggcaaaaagcaaaaaaaaagacattgttatttctaacagcgccaattttgaccaacaagaatatgacaccgcagttggtaagttaattcgtaattacaagaagcaaaagcagattgagtacgatgaattaactactaaaattgctaaaccatttgaattgaacgctgatgggattgacaatttacttcaaaatattgaagatgccggaattagtgttgtcgatgaaaatggggatccagatcctcgtgctttaaaggctactgaaaaattctcacaatctgctatgaaggatacatcagctccaactggagttaaaattaatgatcctgtgcggatgtatttgaaggaaattggtcgtgtaaatcttttgacggctgatgaagaagttcagcttgctttacggattgaaaaaggtgatgaagtagctaaacaagaattagctgaggctaacttacggttagttgtttcaattgcaaagcgttatgttggccgtggaatgcagtttcttgacttaatccaggaaggtaacatgggacttatgaaagccgttgaaaaattcgattaccggcgaggatttaagttctctacttatgctacctggtggattcgtcaggctattacacgggcaattgctgaccaagcacggacaattcggattccggttcatatggttgaaactattaataaattgatccggattcaacggcaattacttcaagatttaggacgtgagccgttacccgaagaaattggtgcagaaatggatatgccaactgaaaaagtacggaatattcttaaaattgcccaagaaccagtttcacttgaaacgcctattggtgaagaggatgattctcatttaggggactttattgaagatcaagatgcaacaagtccagctgaccatgctgcttatgaaatgatgaagaagcaacttgaaaatgtgctggatacgttaaccgatcgtgaagaaaatgttctgcggcttcgttttggtttagatgatggtcggacacggacccttgaagaagtcggaaaagtcttcggggtaacgcgggaacggattcgtcagattgaagctaaggcgcttcggaaattacgtcacccatcacgttctaagcaattaaaagatttcttagaataaaaatattctccatttaatatatatacgtaaaaaagacggatttacactaaaaaaagtagtttaagttaattaattatcttaagctactttttaattttatttaaaataaatgagagaaatcttatttttatattgaaaacatttgattgttcgggtaaaatttttataaagcgttttttaaatctattataaataaaaattgaggagagatcgaacaatgccagaattatctgctgatttatatggaactgttagtcacaagttagatgcattacagccatcaggtatccgtgaattcaataaagaagtttcaaagatcccaggaattattaaattaacattaggagaaccagacatggcaactcctgaacacgttaagcaagcagccattagaagtattgaggaagatgattctcactatgctcctcaaatgggaaagccagaattacttgaagcaatcagtgattatattcagaatactcgtgatgtgcactatgacccgcaaacggaaataattgcgactgtgggagcaaccgaagccctcgatgcaactttatttgcaatccttaatactggagacaaagttgtggttccgaccccgattttctctctatatttcccattaattgaaatgacaggagcaacagttgttcaggttgatacttcagcagataattttgttctaactccagaaaagcttgaagaagttcttgaagaagagggaaaaggcgtcaaagccgttatccttaactacccaagtaacccaactggtcgtgaatatcctcaagaagttctagcaggattagctgaagtaattaagaagcatcatttatatgcgattgctgatgaaatctatagcgaactagtctatggggtagagcactattcaattgctactatgattccagagcggacaatttttatctctggactctcaaaatctcacgcaatgactggttaccgtttaggatatgttgcagctccggctaagatcatggctaatatttcaaagatgcatgccttcttagtcacaaccgtaactaataacgttcaagttgcagcggctgaagcactgacaaatggtttaaatgatccattagaatttcgaaagatttaccagcatcgtcgcgatttacttgttgccggtcttaagaaattaggctttgaaatgttaactcctgaaggggcattttacctttttgctaagattccagctcaatttggaactgacgatgttgcctttgcaaagcagcttgctaaagaagcaaaggttggagtaacaccaggtagtgcatttggtaagggtggcgatggttatgttcgtctgtcatatgcctcctctgatgaaaacctaacagaagctattaaacgaattggtgaatttttagaccatcttgcgtaaattagaaggaagtaggaataggactcctaagtgggtgctatcttgcttcctctttttgttataattaatttattaaatagataaaggaatgatttttgtggatgaaaagcacttatcagcacgtctagcatgtgttgcttcccttgttccagcaggtgcgcgggtggctgatattggttctgaccatgcgtatttaccagccgcattggtgttagatggtaaaattgattttgcaattgctggagaagtagtaaagggtccttatgaaaatgccgttcgtgaaataaaagaccaccaattagaaggccaggttatcccacgtttggcagacggtttagcagcgattgaaccagcagataaagtcgatacaattacgattgccggaatgggcgggagtttgattgcttcgattttagagaaagacaagaataagttaacaggaattaagcgacttgtccttcaaccgaatgtaggggaaagtcagttgcgtgaatggttaatgaataattattaccaaataatgaacgaaaaaataattgaagaagacaatcatatttatgagattatcgttgctgagccatcagttgtcccatttagatacagtaagtatgagcttgattttggaccatttttattggaaaacaaagggcctgtttttaggaaaaaatggcaagaatatcttcaacgtgaagcccatgttattgatcagatgcaaaaggctcaacagccaccagtaaaaaagattaatgagataaacgagtttttatcacaagtaaaggaagcgatcgccgatgacaaccggtaaccaattaattgcgcgttttgaaaaatttgctaatccgcaactagcagaaaaatgggatcatgtcggtctacaaattggcaatccagatctcccgattactcgactaatgaccacccttgatgttcgcccagaagtggttgatgaagcaattgaacaaaatattgactttatttttgctcatcatcccattatgtttcacccagcaaagaatctagatacgcgggatccgcaaaatgcaatgtacgctaaacttttggcgaataatattactgtttatgcagctcatacgaatttggatactgctaatggcggaataaatgactggttagcagatcaacttcacctaactaatactgtgcctttagtgccagcaggaaatgatccaataagcggtgaaccagttggaatggggcgtgttggtgagctgaatgaaccattaacatcgcaaaaatttgcaaattattgtatggatgtttttggcatccgcggattacggttaattgtcaacccgcttgaccaagagagagagattaaacgtgttgcagtacttggtggtgctggtcaagatttttatcaacaagctcttgaaactggagctgatgcttatgtcactggagatgtaagttaccactttgcgcacgatatgattgctaatcaccttgttgttattgatcctggacatcatattgaagtggtagctgcccaccagcttgctaacttaatcacccagtggaagaatgaaaataattggcagtttgaggtgctagagagtagagttaatacagagccgtttacttttattactaaataggttttagataaggagatgctaatcatgagtgaggaaaagtatgaggggttattaccacgttttttgaagtatgttaaaactgaaacaaggtcaaatccagattcaaaaacaattccttctgatcctaaggaaactgcatttttaaatgaattaaaagatgaattgatatctttagggttgagtgatgttcatattaatccacaaagttcatatttggtcgctacaattccaagtaatattgacaaggatgtgccaacggttggcttcattgcccatatcgacactgcagattttaatgctcataatgttaatccacagattgtcaaagattacgatggcaggtcagatattaagcttgataaagatggccaatatgccttaactactactgaatttccatcattggaaaaatatcagggcaatactttaattactactgatgggtctactttgcttggggctgatgacaagtcaggagtagcggagattgttacaatggctgcttacctgatggctcatcctgaaatcaagcacggaacaattaagattggtttaggacctgatgaggaaatcggcaccggggctgatcattttgatgttaaggattttggggccgattttgcctatacggttgatggtggtccacttggcgaattggaatatgaaacatttaatgcagctcaggcagaaattgagattcaaggaaaagatgttcacactggggttgctaagggaacaatgatcaatgctattcaggttgcaattgacttgcaaaatagcttgccagcacatgatcgagctgaacgaacagatggacggcaaggattctatcacttatacaagtttgatggaactgttgatcatgcttcaatgacatatttaattcgtgatcatgataagcaaacgtttattgaacggaagcatttactcgaccgggttgttgctggcctaaatgatgaacttggtgcagacctagtaacgatgaatctttatgaccaatactacaacttaaaagatgcgcttaagaatcacatggaagttgttgaaattgcgaagaaagctatggaaaatctagacattaaaccggatatctatccagttcgtggcgggacggatggttcaacaatttcttataagggcttaccaactcctaatctttttgctggtggagaaaacatgcactcgcgttttgaatatgtatcactgcaaacgatggaacgcgcattggacaccctgcttgagattgtgcggttgactgcggaagaagataaataaattaaaaaggatcgagccattttggactcaatcctttttaattaatcttcatttttgctaggatttgcatctgcggtaattttatccacacaattgataacgactaatcccataattacagaacaccagccgacaagggtgtagtctggtgtcatcgattctagttgacttgtgatgtaagctaggacctcacccagaataagtgcccaaataccagccacgatattctttaataaaaagttcatgttggtcatcccctttgaagtcataccatattctagcatatttattaatgcttttgaaagggttgggttaatttctctatttagtttgatttgatataattttattgagaggtgaaatgaagtggattttacgcccttagatgttaagagtagttatagtttgctaaaaagtcccacccggatttctgacctagttacaacggctaaggaacgagggtataaggcattagcgttaacagacgaaaatgttttatatggggctgtcgaattttataatgcagcaaaaaaagcaggaattaaacccattctcggcttgcggctggtagttgcattaaatgagacggatggtaccaagctagatttagtatttctagctaagaatcaacgagggtatcagcatctgatagacctatcgacgcttcagcaaacacgaaaagataaaaaaatacctttaacgattgcgcaaattagttgtttattgggtgaattgtttataattatccccccacaaagtacagtttttagtatacttgctcagccaacatcaattttaactgagcttgctaatctgggggatgatgatagcgttctgttaggagtcaattcgcggttagatgacgttcaaatagataccttgcaacaattatcaaaacaactatctttgccattagtagggacgtctccagttgattatttaaatgctaatgacctttttgctagtcgggttttacaagcaattgatgccggagttgagttaaaagatccgacaatagaagcgggacgaagaggacaacattatcttcattcgaaagaacagattgtccaagattacaatgcaaagggacttagtgcagccgcgcaaaagacagttgaagtagcagccctctgcaacgttgaacttcaatttagggccccggtccttcctcattttaaaaatcaagcagggataccatctcaacaatatttacgttctctatgtattcaaggattgaaaaaaagacgagtagcaccaggaaaaactattcaacagtaccaagaacgtttagcgatggaattaaaagtaatccatgaaatgggctttgatgattatttcttaattgtatgggacgtaatgaattttgctcaccagcaaaagattacgaccgaccctggacgaggatcagctgcgggatcattagttgcctatgctttagcaattacagaagttgatcctttgcaatacgacttattatttgaacgctttctgaatccagaacgagctcaaatgcccgatattgacttagatattcctgataatcggcgtgatgaagttttgcagtatgtacatcaaaaatatggtcatcaacgcgtagcccaaattattacttttgggacattagccgctaaacaagtcgttcgtgatgtgagtcgggtctttaacttgccccgttacgatatgcaaaggttaatcgatgcattaccacatggccttcacgtgacactcaaagatgcattaaaggagtcacaacaactaaaaaatcttcttgacgataatcctaaatttcgtttgctaattcaagttgcacagcaattagagggattgccgcgtcattattcaattcacgcggcaggcattgtcctttctgagcagccattacatgaaattgtgccgttacaagatggtagtgatggcttattaatgacgcagtttgccaaagacacagtagaagcgctggggctattaaaaatggatttcttgggattgaagaacctttcaatcatggataacatccttcaaatgattcggcaagaagaccctaattttgatttgcaaaaaattaactttaatgatccgttgactcttcaactgttccagcgaggaaaaactgaagggatttttcaatttgaatcaagtgggatcagaaatgtattggtcaatcttcacccaacgaattttgaagatattgtggcagtgaatgcactttatcgtccgggcccaatggaaaatatttctcattttaccgcccgcaaagctagaaaagagaaaattacttatcctgctccttcacttgaaaaaattctgggaccaacttacggtattttggtctatcaagagcaggtaatgcagttggcctcggtaatggctggctttaccttaggagaggcggatcttttacgccgggcaatgagtaagaagaaaaaggccacaatggaggatatgcggacaaaatttattgccggcgcaacagaacacggctattcagcacaagttgctcaccaagtatttgaatatatcgatcgctttgctaattatgggttcaatcgttcgcatgcagttgcctattctatgatggcgtttgagatggcatatttgaaagtttattaccctgcagctttttttacagccctaatgaatgcagaaactaatattgagaaattgaaacggcacgtgggggatgcaaagcaatttggcgtcaaggttagtgggccgcgaatcaatataagtgagagtagttttctattacatgatgggacagtttactttggcttttctgctattaaaggagtacgtcgtgattttgtcgccgcaattcttgaagaacggcaggaaaatggcaagtttacagatcttcgtaattttattgcgcgtattccagaacgttggcaaaagcaagaattaatcgaaccgttaatctatagtggggcctttgataagatggaatataaccgagcggagatgattgacgcccttcctaaattaatttccgggattgagttgtttgctggttttgctaattttgacgatccggctctccaaacggcaattgaccaacgaaatgaattccctctgttgacccgtttaacgaaggagaatgaatacttaggagtgtatctttccggccacccggttacccaatattaccaattaggacagcagctccatgcaactaaaattgctaatttatacccgaattcagaagcgacaataattgtccttacaaatcacgttaagactatttatactaaacgtgaacatcgggaaatggcctttgttaatggaacggatgagaccggagcaattgatattaccgtctttcccaaacaatatcagcagttcaaagagcaactagaaacaaataagattttaattgtcagaggtcgagtagaatatcgtgagggacggggtctacaattagttgctaatcaattgcaggatgttaaaaaagttcaacagaaacgccgcaagcaacgatgggttttacgaatcttaccgtcattagacactgagatggtgcatcgagagttaaataatatttttaatgaataccatggttcaattcctgtcttgttgttttatccagcaaacgataagaagatcctgcttgaccaaaaacgatggttaaaaaattctcagaaagcaaaaaaggcgcttgtcgccgttcttggccaagaaaacgttgtcttacaacagcttaatagtaatcactgaaagctataaaattaaataacagttagaaaaaataactaattttagaatgatagcgcttttttaaaaccttttgcataaaaaataaagacacgttatttgaaaagtgctatcataacagtgtgcaaatgaggcatacaattacagattgtgattgatgctatagatgcaaaaggagagattcatttatgaagaaaaccaagattgtaagtacacttggtcctgcaagtactgatgttgatacgatcgttaagttgatcaatgcgggagctaacattttccgtttcaacttctcacacggtgaccacccagaacacttgggtcggatcgaaaacgtacacaaggctgaagaaattactggcaagcacgttggtcttatgcttgatactaagggtgccgaaattcggactactgttcaaaaagaaggtaagatcaactttgaaattggcgacaaggttcgcatttcaatggatccttcaattgaaggtactcatgacaagattgctgttacctacccaggcttatacgatgatactcatgttggtggccatgttctttttgatgatggtttaattgacatggttattgatgaaaaagacgatgcaaacaaggaacttgtatgtcacgtcttaaaccatggtgttcttggttctcggaagggtgttaacgcccctggtgtatcaatcaacttaccaggtattactgaaaaggacagtagcgatattcgttttggtttggaaaacaagatcaactacattgctgcatccttcgttcgtaaggctcaagatgttcttgacattcgcgaattacttaaggaaaagaacatggaagatgttcaaattttccctaagattgaatctcaagaaggtatcgacaactttgaagaaatcattgctgtttctgacggtttaatggtacctcgtggtgacatgggtgttgaaattcctgcccaaaatgtgccaattgttcaaaagcacatgatcaagcgttgtaacgaattaggtaagccagttattactgctacccaaatgcttgactcaatgcaagaaaacccacgtccaacccgtgccgaagtatcagacgttgctaacgccgtatttgacggtactgatgctactatgctttctggtgaaagtgctaacggtgactacccagttgaatctgttgcaatgatgaacaacattgacatcaaggctgaaaaccacctttgggaattcggtactgaaaagttcgattgggacaagtctgacgtaactgaaactatcggttctgctgttgctaacgcagctaaagacttagacattcacacaattgttgcttacactgcttcaggctacactgctaagatgatttctaagtaccgtcctaatgctgatatcgttgcattaactccaaacgaacgtgtagaacgtggacttatgatcaactggggtgttcaaccatacgttgttgatgaaatgaagaacactgatacaatgttcgacttagctgctaagaaggctgttgaacttggctttgctaagaagggcgacaggatcatcatcgttgctggtgttcctttgggtgtaccaggtgcaactaacatgatgcgtgttaagactatcgactaatattttataatattgtctgcgaaaagatcggtcattagtaaccggtctttttttataccaatgataatcattgatcttactagcaaaataagcctttaccgtgtaaaatcgatatagaataaaaaaggataagtgataaaaatgaattcagcattaggaaaagttgttacagcggtaatgattgatgaaaatgataccgattattttgttcaaccagatcgtaatgggcaaacgtatcgattaccgaaaagcgaaagtcctcaagaattacatattggtggacaggtacgcggctttgtttatgaaaatgaggaccaccaactacagatgacctgtaaacacattccaacgatccaggttgaccattacgattatggtacagtagttaatgttcgtcgtgatttaggggtttttgttgatatcggtcttcccaataaggatattgtcgtctctttagatgatttaccaagcttgaaacacttatggccacaaccaggtgaccgtttattaatgtcccttcaagttgatgataaggaccgtctatggggtaaattagcagatgaccaaatctatcaaactatttcagcagctccagataaacgcttgctcaaccatgatacttatgccacagtttaccgtcttaagatgagtggaacctttgtgattactgatgattatcgtttaggattcatccatccaagtgaacgagaccaagaaccgcgattaggtcaacgagttaaagcgcgggttattggaatttcgtcacatggtagtctcaatctctcccttaagcctcgtgcctaccaagctattggtgaagatgcacaaatgattttgacaatgttagaacatggtataaatcaccgcttgccatacactgataagacggacccatcgatcattcgcgatgtctttggcataagcaaggggcagtttaaacgtgctattgggcatttgcttaaagagaaattagtaaaacaagaaaacggtcaattaatcctagtaaaagagaatcaagattaatgaataatgaagtggctgcgtttttagcttttttaaaagataaacgacaattaagcgataataccttgatgagttatcaacgggacttagaacaaactgtgacttatttagaagatcgaggaattgatgattggcaacaggtggaccactatttgctaattgacctccttaatagtcttcgtcagcagggaaaagctaattcaacaattaaccgtgtgatttcaagtttacggcaattttataaatacatgattcgtcaccataacctaaccattaatccaatggaaatgattgatcaccagtatacctttaaccaaccacctgcaccggtaattttaactgaaaaagaaattgaacaactgttggcagtcccggatgtttcaaccccaattggtcttcgtgatcgagcgttgttagagattatggatgcaacgggaatgagggttagtgaagtaattgccttggatctgacagcacttcatctcgacgttaagcttctacaactaacgggaaagaatgaacgtgagcggatgattcccttaagtcaaccagcagtcaagtggcttaccggttacctaaaccgtggtcgaccacttttgctcagagatgatcacgaaactcgggtgttcttaaatgctcatggttatcctttgacgcggcaaggaatttggaaaaaaatgaaggaatgggtcagtgaggctaaaatcaaaaaagaagttactcctcaaactatgcgttattcttttgctgttcatttaatagaaaatggcgccgatgttcaattaatccaagaaatccttggttataacgcgatgaaggctctccaaccatatttacaggtctcgccgcaacagttatccgctaactatatgaaatatcatcctcgtgcatagaaaggaaaatacgatgttagttcgttatcgaaaagattaccaaaaaatcgccctaggtttattgtccttagtaaaagaccttcgaaaagataatcgttttatggaagagatggactgggcactggctaatgattggccaatctttttgtggaaagacatggatgatagtcactttattggaattgtgatgatagaaataggggattgttacgtgctggttcgccgcttatcgtttacgccaagcgaacgaacggggtataatattttttccttattagatggcgttcacgatcaatatcctcataaacgcctcatgggaaccttagcaacccaaccaataattagcatgtgggagagaagtaatgaataagcaagtgcaaccacaaaatccatttcaaccggtcataaaggttcatgactttgaaggaccactagatttattgctccatttaataaagcaatctgaaatggatatttatgatattcagatttcgcaaattacaagccaataccttgattaccttcaccagatgcaaagccaccaattagaagtcgcgggtgaatattttgtaatggctgcgactctgatggacattaaaagtcagatgctgttaccttcgccgccagtattggatgatgaactagaagtagaggagcttgatccccgacaagaattagtggaacagcttttggaatatcagcgttataaaaaagcggcagatcgactaaaagataaagaaaatctgcgtcaacaggagtatactcgaccagcaatgcaagttccacgtgaaatggtaaaatctcacgtggagccgggcatcaaattaacggatttgcaacaagcttttgcagccgttcttcgccgccaacaattagctactccattagttgaaactgtagcagctgaaaaagtaagcgttggtcaacaaatgaaccacgtgattgaaattattcatgatggtccggttaggtttgaagacttgtttgaagatttacatactcgcgatggcttagttacaacttttttagcaattcttgaactggcaaagcatcaagcgattgttattaaccaaggtggcttgtttgaaccaataattttagcggagggatctaagagtgacgaatacgaaactaaccaaccaagcgcagattgaaggattactttttattagtggggacgaaggaattaccctaggcgatttagcaaaaatttctggttttatgaaaccggctgttctaacaatattacaagagctaaaaaagaagtatgaagatgatcccacatctgcttttatcttgcttgaaagtgatcagacctatcgtttagcaaccaagcctcagttagcagaggtcattaaacattactttgaagtcccgttaacggtaccattgactaaagcattattagaagtattggccattgttgcttatcggcaaccaattacgcggctagaaattgatgatattcggggagtgcaaagttcaggatcattacaaaaattaatggttcgtggtttagttgacactcatggacgtttggatgcaccaggccgtccatttttatattcaacaaccccggctttcttaaactatttcggtttaagcgatttagatgaactcccaccgttacccgatcaagacgaattagaaatgagcaatattaatggagatattttccttgaagcattacaggcgcgagaagaacgaaaggacgataattaatggaacgattacaaaaggcaatggcggaagcgggagtagcttctcgtcgggcatcagaaaaacttatccttcaagggaaagttgcagttaatggcaagattgtgactgaacttggcactaaagttagcgttcacgatgagattgtagtaaatggtgttccaatccatcacgaacagcacgtttactacttgttaaataagccgcggggagttatctcaagtgctcatgatgataaaggccgtcgaacagtggttgatattattcatgatgctgagattgatgaacgcatttatccagttggccgattggactatgatacaactggaattcttcttctaacaaatgatggtgctttggcaaataaactgatgcatcctaaatatgaagttgaaaaaacctatgttgctaaggttgaaggaatcgtcaaaaatgatgagttaaaacaattacgtttaggggtagtcatcgatggtcgaaagacaaaaccggctaaatcgaagctcttgaatgttgaccgtgccaagaagacaagccttgttcaattaacaatccacgaaggacgaaaccaccaagttaagaatatgtttaaggcagtaggacatccggtgactaaacttcatcgtgaaacatatggaccattaaatttatatggtcttcagccgggtgaattccgtgcattaaagcctgaagaagtgcagttattaaagaaaaagtaaaattgaatttgtgaaataatccgaaggcgcactgagggggcagaagatatctggttttacggaaaactacggaatagtacggaaaataagccaagttataaacgttgacatgacagtaaaagcctattagaataggacttgtaaaaatataaaacgtttgtcttcaagacaagatgaaaaacgaaaaagaaacccttgtatgccacgacttacaagggtttctttttcgtgtgcgcccggcatgggtattagctaggcggtgagagtccgctatgggccgtagtagtcggaaccatgagctgaggacaagggtgtccactgcgaggtggaatctgaaggaagtctaaggcaaagtactgcaccgatgaacaagaagtagctataaggctggaactaactggataagactgcatgacaagttaaagtccaacactactcgaagttactttcagtaaagctaccggtgacatggtacgaaagttaatatccttacccggggagatctggcctacacgtttccgacaagaggaataagtttaatttccacagaaacaagcggtgcagtgatgtagcgttgagtaagccagaagtcagccgaggtcatagtagtctgagtaatcagatgaaggactgaacgacaataacttgtaacttatatcggaggtgtaatcaggtgcgacaatcgcagaaaacagaacaacaagctgaccgcttgtcgaggataggtttggaaaaccgaaagtacacaagggcgcgtagtaccgattatggtgaaggtaaaggtatgagtgtcactatccaagacttagtcttggaccgcaataaccttaatcaggcttatttgcgagttaagagaaataaaggggcagcaggcattgacgatatgacagtcaatgaccttctgccatatctcagagaaaataagacggaattgatcgctagtttgcgtgagggcaagtataaaccagcaccagtcaaacgggtagaaattccgaagcctaatggtggagtaagaaaactcggaataccaacagtggtggaccgaatggttcaacaagctgtggcccaaattcttacacctatctttgagcgtgttttctctgataatagttttggcttccgccctcaccgtggggctcacgacgctattgcaaaagtagtagatctttataatcaaggttatcgaagagttgtcgacttagacctaaaagcctattttgataatgttaatcatgacttgatgattaagtatcttcaacaatatattgatgacccatggacactaaggctcattcgtaagtttctaactagcggagtcttagaccatgggcttttcgctaagagtgaaaaaggaaccccacaaggagggccattgtcaccaatactggcgaatatctatctaaatgagttggataaagagttgactagacgtggtcaccactttgtgcgctatgcggatgattgtaacatttatgttaaaagtcaacgagccggagaacgagtaatgcgaagcattacccagtttcttgaaaagcgattgaaagttaaagtgaacccagataaaaccaaagtcggtagcccgctacggttaaagtttcttggcttttcgttgggtgtagaccacaatggagcctacgcccgtccagcaaaacaatcgcaacaacgagtaaagaaagcattgaggttattaactaaacgtaatcgtggaatatccctgacaagaatgtttgaagaaattcatcgaaaaatgcgtggatggcttcagtactactcaattgggaaactaactgactttattcaacgccttgacaagtggttgagggcccgaataagacagtatatctggaagcaatggaagaagcttaaaactaaggtaactaacttacagaagctggggctgtcccagcgtgatgcatatgtcttcgctagtacccgcaagggctactggcgaactgcacacagtaagaccttgagctattctctaactaatagaaaactggaacaactcggacttatgaatatgtccaagacgctccagtcaattcaatgtgattaagttgtcgaaccgccgtatacggaaccgtacgtacggtggtgtgagaggtcgataattgaactaatcaattatctcctactcgattttaaattgatttatatagcacaaatatagcagaaatgaaaagttttattgctagtcaaactcatcaattgaatcgatcatatcaataaacttttttgttgtacgtttagtaacatgtaaataaatccgccgggttatttcactgtcagcgtgtccgactcttttttgaattacccgcaaagggattcctaaatcagctaaatttgatacatgggtgtgtctaaaaaagtgagtagtaacttttttatttatctttaattctttgcaagcttttttaagaaagacgtttgctgtatttaatctcagtggtctttctggacgcttaggtgtgagtggctgggttattaaccagtcatctggatttttatccttcatgttgcgtttaacaatagttatggcttttggcgaaagcatgatctgcctaattccggcaatactttttgtacgatctgatttgatctgctttgagtgatcgtcggtaactaccattgttccattgatatcaagataagtatatccactttttttaagcacatctttaacttgtaaggcaatcaattctccaaaacgtaaacctgtaagatactgaagcttaaaagcgtcggcatagtattgtttgtgctttttgagacaatacttgataattttacgatattcagcatgagttaaatatttgttttcaattctatttcgccgtgcatctatttcgttgcgccaattcacttccgtatctttcacaggattaatattcaaatatccataacgattagcaaacttgtaagctaatgatagggctttgcgagtatttctaactgtactatttgatactgggtgctttttatcataaaggcgattatcaaaatatttatttaacattggagttgttatacgttttgctaacgtgtcacctccaagagtattacatgttgtttgtagaacatttttattaattatataagttcgaagagcaactcgatgcttatagtattcgagaaattcatcggtcagttcctgtaacgtaatattggtattgcttgattttatctccctaatacgtttttctatttttttctctagtttattagttgcttctttacgaacttggggcgtatttcgatcatatgatactgaaactgttttattttttcctgtcttaggatctttgtaacgttcaagaaattgataatgtataacttgaacgtttttgccttttattgttttgctagttttatacgaattaatccacatgaaaacgttcctccattcaaataaacataaatgttataatgaaggagttaaaaattaggggatataactgatttttaactcctcaatcaatctccattgcagtgaagattggtgaaattagtcaagcctatttcctattgcagtagggaatgggcttttttatttttcataggacatcacctccttaaaatgcaaacaggtgttcttttaacgtgctttttaaaacggccacggatttgaccgttttaaattcattagttatcgaatacttgtaattgttgatcttttgtatttattaaagcaacaagactattaaaatttaaaaattgaacgttatgatcttttgcattttgaatagatttgtaatgcttattagtaataccatttattaaatattgagtgttgttagtccagcgattttcaatgataccaccgcgtaattttatttgctcaatcatttgatcatgatcgaattctgggaagctaccaattactaagaaatgaataccgtttaatgagagcatcttatcattagcatctttaagaattttaggtaacttatcatctctgagatgcttatagacaagtgcagcagttttactatcagctagagcattatgtgacggctcattaatgccataatattcttttagagtaggtaattttaaatttcctaatactgttcgatctaaatgttttcgtgcgattataaaagtatcttcggcatagaactcgttaattgaaagaccactttcatataagaaaggaatatcaaaagcaaagatattatgaccgatccaaggaagatcacctacgaatttttcaaatgaaccttttatatcattaaaagttggtgcagctttcacgttttgagtagtgataccagttttattaattataaattctgtgagtggcaatttctctttacccggattaacaaaactattaaacgtatcaattagcttatcgtctacatacttaactgcagaaatttggataactttatcaaaagatgcatttagtcctgtagtttctatatctactgacacaaacgaattaagtggttttcttagtttatgaattattaattcgttcctctgatcaattatatgttccttatttttccctttacttgtttgagcaaaaggtgttttttctactgaaatttgaagactgaatgaataaggtttctcaccagtataaatatggtcatcaagattgactgctttatactttccaccagtcatatatccttttaccgtaagctttactaaatctgccctttccttttcaattaatcgtttaatatcttttgagttttctttaggaatgtatccgatcataaaagattgagattcaatgtaaataatgactttaacggcattgctatcatatttattacatagatcgggaattaatttgatttcatttattacatcagtgagatccgtttcatagacaggatcatcatcagtataaaaatcttcacggatctcagatgctgtcatatcatcataccttacaaaaaacaaatcattacttcttgcataaccaacggcattttttaatcgataatagttagtgcctgctacatcaatatatagtgtgttactagtagtttttgtttttttcttcgatttaagcgttatgttgttattaactaatttggcatgctccttaatcaagtcgatctcattatggtgtaaaacatgtttttcaacgttggtaggcaccgaaacttcaacatcggtgttcaagataggagtagtactaacttgattagtgggtggtgtattatttaatttttcgtcttgttcatgtaatttattgctttgtttaagcatatggttatactcactgtcttgataattaaagggtataaaagaacagatagcaattaatgataagcaaatgccaattaataaatttccttcaacaaaacttcctatagcaagatacgcaaatagagtagcatttaagtatagaggaattctaaagtcaatttgattacgataagtgttattaggaatattaatagctctttttttagttgcaagttgtgattggatatcagatgatatccatataatggtcatcaaaataaaaatgaagtttaagagtaaacccgaaatattgagattaacaacaaaaattaaaacaataaagctccaacaatatgctgcttttagtggatgatgcattgcccataagcgtaatttgttattttccatagaataatccccccaatttcttattcggctaaactaataattcccaatcaatgtaccgttcggcccaagaagggatgcgacagtatctcattagttgttcccttgtttcaaaatcatggacgttaactccatcaagcatcatatctaccataaatttgtttgcttcatattcttcaccaaaagtaacaaattttcgattgcttctattaagacattcagtattcccttggtgatgacaaaaatgatgacctaactcatgtccacatgcatatctattttcaaaattgctatttcgtgttgataaaacaatagcaggtactcgtagtattttagtatgataagccataatttctttcccaagatcatgataataataaggaatacccatttcttcacatattttaaaaggattgtgcgttccagttgaatagactatttcgtgagctttatgtttaatccattctttagataacatataagtcacctcattaatccttatcttttcgatattttttaggtgtaaatttttgcttagcaattagtttagactgcctaattacattttcaagcgaggcacttaataactcagcgtcttctgggtcaatttcctcgcctccatttttcaagaacgctaaatcagatttattatttaatcctcttgtaatatcttctaatatcttttgtacatctcgttcatctttccgagtaaattgtggagtatctgtgcgtcctagaagataatcagttgtaacattatagtgatcggcaactgccgccaacttttcagatgatggtgatcgtttatcccactttgtgattgttccgtttcctatacctagctttctttccaattcggcgagtgtctcgtggcgttgtgcggctaggccttgaattctgcttttaatagacattaaagtcactcctaatagaaacaaatctaaaataggggttgaccattaggcacaaatctaatatactgtaattgtgcttgagggagcacatagcaattacgataactgttctgatttaggagccttagtggtttcccttgtttttcttatactctaataatagattttagtctattatttgtcaatactaataggcaaaagaattaggcagttttctcacactagggaggtgaaagtgtgcctctatatacagctatcaaagaggttgcccgtgagcagaacaaatcgatctatcgcatagaacatgatttaaaaatcggaaatggcactatcgggcgctggaatactgcgttgcctcgatatgatttacttcaagccgttgcagattatcttggcgtaacaccacagtatttaatgcacttatctcaagctaaagaaaaggagtgattgtcacgaatgcgattaagcaaattgttactactataccggagataaatcacccaagttttcaaaatactactcacgaattcatgtttggaacgatgtttccaaagctactacggcaagtcacttttggaacagggaagggtggtcttgccaagtggggatcgaagaaatacgtcgccgacttttttgaccctgacactaatacaatttttgaaattgatggtgccagtcacaattctaaatatcggcaggttgcagatgcactaagagacaaattctttgaaaacaaagggatcaaaacaattcgcatatcaaacaggatggttgaacgactatatgtacaacaattaaaggaggatatagctatcaatgggaaaaaataccaacaagcctttaacgagtttttctgatcctagcttagatacttcaacaatagctttcctcaatcaaagtactcaccagctcatgaacgttgtttcggatagtgctactcaaatcggaaaaatcttatatgatgcacagaaaaaattagctagtttccataacaatggagcctttgccaaatggattgagtacatcggctttagtagaacttcagcttacaactacatcaatagatatgttgctgttcaaaatttggacagcagtaaagaaatacaagcgtttgagtctctgcccaagtcattaacttatgatatttcgaagccaagtgctgatccagagttaactaagaaagtccttaacggtgatattaaaactcataaagagtacaaagcactagaagctaaactcaaacaacgcgaacaagaacttgctgatcgtgacgaaacaattgctaatcaacaagctgaattagaggacaatcgtaaagtgcaactggagcttaacaaacgtaattctgaattatctaagcagcaaccagaacaaaaagttattactaagacagtaactaaagaagttccagttaagcccgatgattatgacgaaattaaggctaagattgttgaattgaaagaacagtctgctaaagacaaagaaaatattgagtattacaaacgagaacttaaagccgctgaacgtattaaaaaaaataccaatagttctgacaagttacaggaacaagaattgaaacgaaaaaagcgccaagctgaaattaacggctatagcacttcgttaaaaattaatgattggattcctgaattgcagaaacttagtcaagaagatattgatgagatgggtgaacaagcacaaaagaatctgcaaaagcgtcttgaattattacaacattcgattgatcgacttagttcaatgttaggcggtcgacgagttatagaaggagattatcagtaatgaaagaaacattaacagcaccggtaaaaagtaaagagaaatctagcttgtctgtgcttggaaatttagtaaaagcacaagcactccaagccgagattaacaaaatggtatatgaatcaattgctgaatctacggaacaagcaaagcaagaattaaaagaatataccaatcagagtattgaggagattaagaagtttattcctttaactgatggagaagcaaatcggcttaaacaagcaattacaagtcgagccgcagtgaccactaaatcatggttaaagcataaattcaataacccagaatatggtggtaaagaattcttttctaagaaatatgggcatattgttcgtgcattctattcattaactaagcaccattttggagcaattaaatatacagcaatccttcatagtgactttgaagaagcacttggttatgctaatcagcttaattactacagtcttccacaaaatgctaagcggattactgaatcgcaattagtcacccttaataagtgggaaaaggttcataaattgccattaactaaacctgaggactgattgaatatgagcgagaaaagaaccccacagcaactagcttttattttgattcattattggacacctgtgattgaagaatgtaactgggaaacgcaaaaggcatgggtcttaatgctagacgaaacacttaagcgactaacacctctccaatttgctcaagtatttccaatcaccaaagaatacaaaggacatacttggggaagcaaagattattacactgttacagattggataggggataacgtaggctggaataacaagattcctgatgggattaagttcttattggaatacttgaatatcaacgtacaacttacagcagtaagaattatgaacattttaggtaaatttcatcaacgccaaacgggaagtgatttactaatcgacttcttaaagtcacaaggtgctcatattcggtttacgaatcttgatgaggaggatcagtaatgaaatgtgatgacgtgaaaaccaaagacgaaataatgaaaaagtacgggctagaaaaaagtcaatttagcgatcttgtggctgagtgtgaactcaatgatgaatttagtacggcgattattagaattactggtcggacttactggattcatgaaaatgaatgggtagcctttttagaagacaaggcagcaaagtatcatcaacaaaaatctggacgtttacgaagaggagcataggatgacagaatttattgtttcaatttgtgtgatagcaatgtgtctcatcttaatggcaataattgatactttggttggtaatagtctcaaaatactaaaaccacgttatcgtgggcgacacaatattagaaaaaggagttttaaaaatgtttgaagaaccagaattaaaacaatgcgcagagtgcggaaaagatattgacccagacgatacctattacattgtaggagacaactatctgcaacgtaattattttgatgatcctgatggtaaagataatattttttgctcaaaggattgtctcttaagaagtctatcggtcttagagttcagtggtgatggtgacgattatggatttgaggtgtaaatggtgagagcttttgcatgcacaggaatatgtttcttgatgttcatttgctggcttggcggttggacactatttggagtccttcctttggctgtcttactgattcttatcttgctaggcgaattatttcctaacttattgcaatgaggggaggtgatataaatggaaatttcagaagaagagttaaacagaattattgaacacaaagttaagtatcaagtatatgaagcgctgaacaaaaggaatacgccgaagattactactggctggttgcaactaagaaaacgtatcgacagctattgtcacgatcatatgagttcaaaatggcgtcgaaaaacgtcttacaattctgttcaacaaatgttttatgtaccaatgaaaaagatacttgatctgcaccgtattgatgaaatgagtgaagaccaagtaccaatcgcaaaagaaatatttgagtttctttctgctgagtttgaaaaagtcgataagcaaaaagaaaaagagcttaaaactaccgcaaatagttaaaagctcatatcaaaaaacaatacacaaggtgagtataacacatgacacttaaaaatacgaaacaacaattattaatgtatctgtcaagttttcataggtagcctttaaatatacagttttagtgggttagtgccttaaaaagttgtcccattggtctacttgtggccgtgttaatcggaattattccttgtactgctccaattgacggctttgtcggtgcctttcttagaaactctccagttcgaatatgcatttcctgtaataggctggtttgagccactcgaggaagaactgttaattgttctaggattgtatttaaactagcttgcagttcaccattcattcgggcttcaattaaaccaatcatggctttagccccctgcttagtccatgacttgccctgtttcttcatccggtaagtaaaagcccggtgagaactttcgactgaaccaattaaatgaatatccttaaatccacgcatttgtggtgagaggatataccgccaatttcgctgtagatactttcttaaacgcattaggtcgtctgcttgtttttccgttaggttttgtgattcataagtatctaaaattattgttagctctgcttgatcatgatgacgaacggctttaattgctcgcatggctaactcgttgtgccggcctaaagtatgttcaattttctgtaaacaatgatagcggtcgagaaagtattcaccatgtgcaccttgaggaactagacttaatagcttagctggttcgtaacctgggccagcgtcactggccaaaaagatcgtttgaccggcaagcttataatggcggtctaaataatcacttagtcgtgcttcaagccgtccttggtgcccaacactgagaaagtcatgccgattaatgatttgattagctactcgctcataaacccgataatggtgcacaagagtcagctgacctgcttcttttttacctttaatcataaaggcatcaccctcaatagttaaatttttaggcatatggcgaggagtagcttggtgttcttttgcttgagtttgtttagctacctgatttcctaactcatgcacggcgtgcattaccgaatcggcagtaattccgctgtcaaatacaaggttcaaaatgtcggcagtattgcgcattgtagttgtttgggcaatcttagccatcatcattaagtattgtggcgataaacgacgacgtggtttaatttttaattgttggtctaagtaaaattcacgtttctttgtcccagcctgataataccgtcgttgaaaagtcaccgggccaaagataaaattaagcgtccgtggctgtttattaattacttgatagttcgctggagcttgggactttaagcttcgatctaagctttccaaaaagttttgcatgattacttgtcctaactccaataccccttttaaaataatctgttcagcttcaaataaactgcctgatttcaccaaattctgctcgatttctgttaaaatatccatgaggaaagacctgcctttgcttagtattcgacacactaaaggctactggtcttttctttttttgtaaataagtaaattggtctacaaaaaagatttccacgaccagatgaattattcatccaacctatgaaaatcttacactaacattattaatgcagatgatgacacgtgttgacacgattgctgccatgataacacaagccaatggtggcgaaacgtttggtaaggaagtatatgccttaagcaaattacaaaatgaatgtaatttgctaaaaatcaatgctgacaatctaaatacatggtttgtagaagatattcataaatcaaaggagaaacagaagtaaatgttaaatcgaacaattttaacgggacgtctaacccgtgatccggaattacggtataccacaagtggaacggctgttgtacaagctacgattgccgttgatcgtcaatttaagaaccaacaaggagaacgtgaagctgatttcatcaatcttgttatttggcgaaaggctgcagaaaattttgctaattttactcacaaaggctcacttgttggtatcgatggtcgaattcagactcggacttatgagaataagcaaggacagcgagtttacgtgactgagattaatgtcgatagtttctctctattagagccacgtcaagaaaatagtcaacaatctaataataactattcctcacaggtaccaaataataatgcacacaacgcaacatcaaatagtcctcagcaaaaccagaatgctcagtcaaattacggtaatcagaataatgactttggcaatggtggacaaagtattgatctggctgatgacgaattgccattctaaatggaaagtggaaaagcttactatcgcaataacatgtgggtaattgttccagataaaaatattaatttggaacatatcgcaattttgaatgatggcttgatcaatggagttcctattcaatttgaatttacggatcctcgcaaggttcaccctaagcaacgcactctattcttcgcattgcttaatgatattcatgagtggtcagggatgcctaaagaaaaattaaaggaatatttctataaaagatattcaaaaatgacatctggtaaagagattagtcttgctgataatacagaaaatactgtaagtgacgcaaataagcttattaaggatgttatcaattttatctttgagtttgatgttcctgttagaaatggttataagctgttgccacgtaatgaaagctacttcatttacaagtgcttgctgaaagacaaatgcgttatttgtggcaaaaaggccgactttcaccatgtcgaagggtcagtagttggtatggggaataatcgcaacaaaattgatcattctaaacgggaactttatccgttgtgtcgatttcatcatcaagaaatcgaaagacttaataataaaaggtttgaaacaaaataccacatacatgttaaaggacttaagctgccaccagaaatcttaaagaaactgggggtcaaaggaaaatatggtgattagaaatggcaattattaggcaaaagcgaaaagaccgattttcaattatagacaaccgaattattgaggataaaaggcttagttggggagctagaggtcttctggaatatatgctatcaaaacctgacgattggaaatttcatatgagtgaattaatcacccatagtaacaaagatggcagagataaaacatatagcttcatggacgaactaaaaaaatatggctatgtgactagaaaacagaagcgaaatagtaatggaaaattcggtaatcaagacttagtcgtaacggaccaaccgcttacgggttttccgtatacggctaaaccggatacggattcaccggatacggtaaatccgacactactaaatactgatagtactaatactaataatactaatactgatattaataaacatagtgcatcgccaggcaatgcactgtccgtatctgtccttaaaactagctttgagaaactttggaaagactatccaaataaaaagggtaaaaaagaagcgtttaaccattacaaagcatggcgaaaggaatccactaagaatacggatgattacctggcaaagcaattgaagaagtatttagtttactgtgaacaaaacaatagttggtatcatcctatgaatggatcaacgtggtttaatgggcgatttgatgatgtccttgtaacagatggcattacgcctaatcaatttagattaaatcacggaaaacgtccacctattcgagagaaaatgcctgagtggagtaaaaaagatcaaaaagagttaaacaagaaagcatcccccgaggatattgctaaattaaaggctcggattgcaaatcgaaagaaagtgagcagctagtggaaagagagtatttaacaggaacgcagattatatttcgcaatggttttgagttaatagtaagagaatcaacccgagaaataattaatcaaggtctttctagtgacaggataattgttactcgtccttatcttgggaagatacagcgaattaatgtggaatggaacgatatggcaaaactaattgctataaaaaggagagagaaagaataatgtacatttacgaagtcacgcgctctaagggattatattttgtcagacatattgtgatagctaagaacgaggaaagcgctaaaaaattagttgcagatatgcttaatgtatttcagactgctattttctacaggcctactgattttgaagttagcgatccaattgatcctaataattatagagaggaaacggtgatttactaatgctacataaatacagaaagacagccttaatcgaggctgaacagtttaaggctactaataagcagataagtgattatcatataggattagatagaagtaaaggtcaccaccaccaagtagagtcttattatctacctactaaagagggagagatgttattgcacattggcgattacatcgctactggcatagatgaagagcactgggctattgatcaagatatatttgaacgaacttatgagaggtgcgactagatgaaacatgaagcggaacaagaattactgaaaacacttaatggacaattgagcgagttgccggccgttgctaagacaatggttcaacaatatcaaatgtcagcaatcgttctatcagttttatgcggtgtgctttttattgctgcgttaactggcactatatggctatcaattttcttttttaggaagcatcgtgattatcatgatagctatgattttgtttctgggatgacggcaatgtttggaggaacaataagtgtctgcttattaatggcattatgtttgaatattattcacgcttgtgcaccaattgcttcgattattaaagacttattgaactaaagaacgaggtgaaaatgaaaataatattcaatattgagcccgtcgaacaggcacggcctagagcaactaaaacgtggaaaggaatacgcttgtatgatccgaaaaaggtatcgacctacaagaaacagttggggatgatgtgcaaattccagtacaaggataagccactaactggcccgttaattgttagtcttaaattttatcgacaagttcaatcaagcgtatcgaaaaaagagcgtgaattgcgcctctcaggaatacacagaccgattgtaaaaccggacacggataattacatcaaatctactttggatggcttaaacggtctgctatgggaagatgacaaccagattgtaaagatagttgctgaaaagtactacagtgatcgaccacgtattgaaattgaagtagaaaggttagaacaaaatgaagatgaaagaggcggaacaggcgctaaagaataacactttagttctttatcaagatactttgtgctcagtagttagtgttgattatgatcacagccgagtaatgattagtgaggacgaacgggaaaagttcggtgaatttgtaagtcggtatgttgatccagaacaacttgaacaagtagtcaggagtaactatgactgattaccttactaaaaatgactttctaactcacttacggaatttagaagataagtacggtaaacgattaaatgactatgatttcaatttagatgatttagttcaaagcgatcacgaagactaccaagcgattttagaatttcgagagttagtaaaagatagacggagagcgaaaataaatcaccgagatttaatcgaactgctaaatacagaacttactctaaaacaaatagcagaaaaacttaattgctctacgccaaagcttcgaagaacaatcgaagctaatcctaaacttagaagtaagtatgaagggttgatagataagcgaaaagagatgtcctttgatagtttgaaactacggcatgctcgtcaaaaagaacatattggcaaagagattctaaagttaagaatgaacatgaatctaacgcaagatgaggttgccgataagataaataaaattttaggtacgactacgtgttcaacagggacagttagtaactgggaaagaggagtctcaatgccaagcaagaaaaggctcgaggtaattgctaacttatgcaacacgacagtaaaagaattgatggagagagaatattgaaaattaatgaattcaaaaagaaattatctaggtatggtttcagtgtagctgaaagtattgatggtttgctcacaatttatttaggtaaatacccactgcttacctttgatcgatgttcaagcatgtttaacactgttaaattaaatttaaatactgtaccagtgattgatatatacgggcttttcaatcttttggaaatcacaaaggaatatgtcgatacacctattaaagaacgttttcctgaaaagaaatatgttttatctgcaatgcgatgtgctgagggaccagtgcctgttaagcaatatgttgatgcaatgaatataagcgctaataatgttgagttccattttggatttgctaatgaaaaagctgatgctatggaatttacgcaaaagaaactagatagtctttcagatttctttcctaaagatgcaattgatgcaatgaaagaacctgtggaggacaagaatgaataaacgtattgaagatatagatattacgcaagaaaatgtggataacttttttaaatcgccagaaatgaagcaattttttaaaaatttcaaatatatgcttcatggatataagccgatcaagcgcactcgtaagcgtcagattgctaaggctaagcatatgatggcttggcacgatcacacgagttatgagtggtcacaatggtggcacaagaaagctagaaagcctaagaggtggaagtaatgaagcaattaccgttatgtgtggggattgtttgtgtaacggcaattattatcacaatgattatctgcaaggttagccttgaaacaatatttagtctgattattggattgatgattattgctttcgtagttgccaacttaattgatttatgaggagtttgaagaaatgaatgaatttggtgaaaccattgtcctaaaagttaataaagataaatgcttagctggcttttatgctctgggttttgaacctaaagagattatgggagttctatatcaagcgattaccgtgttatgtaaggaacagggagtagatccggcagttcaattaatgcagttgatgatagcaacggaggaaggaaagaatgatggaagagagagtttttgaagacgaacacggtagaaaattaattgtgcgggtgaataggtctaatattcaaatccacacagaaagaaaagatcttctagattatcggttctatttagataacattgatttacttaaattcttaaaggaacaagcagaaaaagtctggaagacgtttactcccaaagaagctaattcttttggggcagattattgggaattttatgataaaaatactgataacaacggatatttagaagttagtaaagaagctcttgtgtttcgaagtcccagcgatgaaacaactttgctatatcaatttaacaaacgaaagatggaaagctttatctacgatatggaaagctggtttattctatgaaaattcttgatgtgtgctgtggcagtcgcatgttctggtacgacaaagaggaaccacatacaacctacatggatatccgcagagctgtctacacagcaatggatcgtggtaatgagcgaaagattgaaatttatccagatgtgcaggctgattggaagagcattccattcgctgatgaaactttcgatttagttgtatttgatccgccacatttggtccgtgcgggtaagacatcatggcttgctaagaagtacggaaccattgatttaatgacttggccacatgattttcattgtgcctttcaagaaataatgcgagtgcttaaaccaactggaataatgctattcaaatggaacgaagatcagataccgattaaaaaaatattcgaagcgtttggccagcaaccaatattaggcgatatgaagagcaagacgaaatggagcgtctttattaaaaatggcagaaataattaaagaagatttttcaaagcaaaaatgcggtgtgtgccataaacgctttgctactaaatggtgcgattacgtgattcaatatcccgagtcaccaacatttatttgcggaagaacgagctttcaagattttttgtcagcacaacggcaaataacttgtgattgtgctttgtgtgatgagtgtgctaaaaatcacggcttaattgatttttgcccttaccacgaaaaaattgtgaaacacgagaaaatagatacgcctgattatgtagtaaagtcacgtgtggaaacatggaggagagaaaatgagtaaacaacgaaaagtacatcatgaggtagcgtcacgacaacatacgtatcatgtagcaaggaatttagcacataaatttggctacaggcataaaccacgttggagaaaaagctgtcgagaaaccaataaaagcgctagacaaatgacttatgccatgtttggccctgaatatatgggagtagaaaggaaaagctaatgaaactaactgaaaagcaaaagaattgtccgtactgtcacgttccatataagccatttatttcaactggtattgaaaacgatttggatttgggtagcggtaatggaccagtgtatgagggtataagcaatgtacttggtaaaggacctatcatggaaacaacattagggataatcaatgtattaaaagttccgaattgcccattttgcaagcgaccactaaacaaggaggaagagtaatgaaatttatggataaattagttaatgcatttgcagttacaacatttgttatgctaggcggaatggtttggggatcgtggtatgcaattgtttggttttcttcaccagtattttttcaatggtgcttaggattaattccgctaatagcgcttgctataatattgattttctttatatatcgaggtaacaaagatgaaactaaataatgacgaacaagtactctatgacttcttcgttacttttggcaagggtgttggattaatcggttatccaatcgcaatattagcaacttggacaagcggagacgaagaaaatgacattgtagtgtacccacataagcaagaagtaataaatgcctactgtagcttagatgggttggataaaccattgtatgaagcaatcaaagagattaagggatggaagtaatgaacaaggatatttttaaaaatcatattgccttttatcatcactatgggccttatgaatttctaatctggaagagtagaggttatgaatttaaagatcgtattgattacttttttaatcgaatgacttctactctaagtatttcaggagatttaggcagtgctgtgcttagttggaatacaacgggaaatactcttgataatattgtcgattacagcaagagcttaggttactttgtcggcaagatggaaacgtctgatgataagtacgaatatgactcagatactttagaaaaagaattaagcgattatttaggattggacgatgaagaagaatattcactgagcctagaagatcgtcaagaaatgaaacaagatttaattgaatgttttgatgaatttactggcgagtatgaccttgcttctgatttacgcgataagctaattgattttgatcccgattggtgggaaggcattcctaatggtcgccggattagcgatcgtgcaagattatgggcgcttggattacaacaagcaatggcgcaaattaagcaacatgaaaacaatgttagaacttttgcagatacgcagttagccgatatgtatagtatgatttgtgacttgtctgtaagtgcagaattgtataaggcgaaaacagaaaaagcatttcaagctgtgagagctctaaatgttgccttaaacgatgtagatgataaattcgaacgattaaacgaaattgtagaagaagatcaaaataaggggatagattaatgaaaattgaaaacgaagcattatttaatgtgaagaaaggtgaaggtggatcaattagctgtagtcctaaaactggtaaatttatcattactgcaaaaaagtttaagcaatatttaactgatgatggggttgaagaaaagaaaacccaagttaatcttgaatatacccgagatgggtttgctgcactagttggttcaatgatggcgcaactcagaatctatgatgaggaagcaaacaaatgaaatatataagtgattacattccccaattatgcataactgctgttttaattgctgaaatagcatttaaagcaagttcggaagtagttgctggtactattgctttatttgcgctctctttttggttcagtgattaagaaagtgaattgatgtaatgcaagaacaggaagtaattaaatattgtcagaatgaaacaccagtgatttatcacaaacacaattactatattgttggcatcaataaactcaatcaaactgttgatttgcaaaaagcttcggcaattggattgacattagacgaacgaacaattactaatgtttcttttggtgatttagaaatataaggttacaaacaacgggtaacgaatgtggggtgtcaagttggaattaaaagttgctcgccaaatgtatgaactagcagtaagacgtgaagaaaaccggctcactgctaaggataaagaaattctaggaatgattgaaattcctaatagtcaaaccctaaagataatttatcgcgtttcattagaacgaagcgatgcacttaatacacttaacgattttatcgctggaagaaatcttccttggattgaatcggcaatgcattttttagaaatgtattatgatcaaaaagaaaatgggatgacacatgaaatagaaattgctatgtgtgaatgggctcggagtaaaaatgttcctattaaagctgttagattaattactcgccacaattgggagtggagtgttgaaaacttaaaccccaagaaagcgagaataaattatggatgagaaacagccaaaaattaacagcgttgccattgagaaaattctgaatatgtatcgtgatgtctgtatcgccgagaacgcatttattaatgattgcaatcactacaacgataactatgagcaacggcgaattgctttcgaacaggtgctagaattagccgatttaaaagacgatgcattattacgagcgtggcaaattagaaaagagattaaacgtcagaaatggcatttaactcttgatgaacatggcgtgaataaatatgtacgtttagacaataatgaaagtaggggttgattataattattacaattagtggtgtgataggtagtggtaagagttcaataaccgaaattctatcgcaagaattagggacaaaggcgttctatgaaccagtacaaaacaacccgattttacctatgttttatcacggaaataaaatggttgaagaaggcaaatgggaaacaaatccgtatgcctttgaattacaaatttattatgtaagtaaacgcttcgatatgcttaaacaagccgtacaagaggataataatatcctggatcgctcaatctatgaagacgaaatttttatgaggatgaatgttgagcagggacacgcaacagaggaagagtggaaagtatataaggatttactgaacaccatgatggaagaatatcctaacttttctccttataaaaaagcaccagatttgatggtgctaataaaggttgactatgacacgatggtttctaggattaaaaaacgtggtagggcgtttgaacaaatagattatgatcctagtttagtacagtactatcatgatttaatcgaacactatgagaagtgggaaaaataatatgatgcaagtccattgttagtcattgatggaacaaagtatgatttcattgagtcgattcaagatagaaatattgttttggatactattgaagaaaaattagtagacctagggagcttgtcctcaaagaaagtggaactcctaaaacagaggcgacatcaatgaaaagtacagtgatggcatttacatcttggctaattatgatggtggtaattgcattgtttctagtattagttattggaatacatattatgtgttttaggggactaatgatctttttagaaaaaattttgcaaatcgcgtgtctaaaattgccttaatttttaaaaagagtatcttaataattgtattcaattcgattattggtaactacgatgttggatatccgactgaaatcgtttgtttgaattgtcttttccgttttgcaagtcggttcgctggttcgactccagccgtagttataggcgtaatgccgaaataaaattcaactctgtattctcgttgcctatggaaggtcggagtattagtcaccgcttgctccgttagcaactgcgtatgataggttcgaatcctgtccgagaatgttagtctaggcttgacggaagcactaaaccgccgaagaggataaagtacatgtcctggtcaaggaggccacttgaataaacgtagagataaggggaagcctaaaggactctatctaaatataagcctagcaaaaaattcaccgcgaaagccttaaaaagagggagctaagcctcgggttataaaatgaagacacaagctctgcttaaggaaattgtaacttagcatacaatgaagattaagtaacttgtctaactactgtcgtgcgttttctgggtagttattttgttgatttagctcagaaggtagagcactaccttgaagcggtaggttgcggtggttcaattccatcaatcagcatagtcctcttgggaaaaatcatcactaccacagatgctggtatgttagctaataatctctaatagaggagcctatgacgataggcacatcaagagttaagtataggagatcaaagaggcctcgcttagcttacgatgttattacggagtagccaagttggtaaggcaacggtttttggtaccgtgattcactggttcgagtccagtccccgtaattactgatgaatctccagcatcagttatagtagtttacatttacgggtcagctactattgttaacgttctctggtgagagcttatgtgtcttgcaaccacaacacatatgcatgaagctggttcgattccagctcttaacattgctgctatttagtggcactcccaatataaaaactttggtttggtgttgctcaagtggtgagcgtcaattctggttcaagtccggacaccaaaattggtcatgaaattgactactatataagagatcttcgaggtgaagttgtgcgtaaatcagtacaacatatgctagaagacatactgcgtgattatcccaaacttcccagttacattaagcaacgagaagatgaattgaaatatcctacgcctgaacaagacgataatgttggcggtggtcgagctctgaataaactgagtgatccagttggtcgagaagtaataactattaatgatgatcggtggcttcaacaattaaagaaggaacgtcaagcaattgatgaatgcttagatgaatccggtgtggttactgaaaagattattcaagaaacttacttcaaaggcaatgtcgggttacggatggttgatttatgtgatcgacaaattatcccagttagcactacgaaagcgtacgaattgcgtaatagttttctagttgaattaggaaagaagctaaacgttgatgtaatgtaactagcaaattcgctagtttttatggcggtgagagctttggaagctagactgtctcataagcagttttgttaaggttcgattccttacaccgcaattgggagttaatcccaaatgagctttgtacatccctaatttaggtacatatttagactaattggcaagtcgtcaccatcccccgtgtgaaaacctcagttcgattccgagaatatgtattctgaatacagaaaacagttcctatagcttagtctgttaaactaaatacttatttactgttcgtattcaataattgatacagaagacggttcctatttgaaacaagacttcaaatcttttgtgaattaccgtccgtatctataaacacaacgcagaaaaacgttcctattaatttatacagcaaatataagacatgtttacgtttcgcgttgtcatatataaactaaggtgactttatttaaggtcgccttttttattttctgaaaggagaccgaacatgagaaaagaagaagcaactattaaattattcaaagcagttgtagaagataagtttagcaatctgcaagcaacagaacccagtttattattggatgcgttaaagaaaggtgtctttattaatccacatgtattagatggtcgtactcaagaacaacaaaagactgttgtgaaatcagcagtatgggaatacggagttgatgcagagaaagtaaattcaaccttctataaacgattttctgatgtcgaaggtcgtagtgaattgcaattgcggtttgaacaattagcccattatatgagtacgtatggacgtggaattgatcgtgatgatattgaaatctatgagccagaatttctaaatggtttgcacatcgatattaatgatgaacttgtttatattgatgcaattacggaagcagaattagcaaagaaagttaagaatatgctaactagcggaattgcattaagtaacgaagatcaagtcttaatttctgaaattatcgatggctatcatttaacaattgattatgtagaccaaatcaagaatcgtgaatatatgtgtcatgtgtgtgaagaattaatgctcttaccaaagaatttcgatgaatttactcgttatctaatttaccttgcaactgatagtacgttgctaattaaatctcgtgacatgatcaatcgtctaggacatctaagtaattcttggagtagtgaccagaattatatggtattggaaaaaacatttgaacgatatgttaagagttttggaatagaagaagccgctaaacatattactcgttatcgcaaactctatttagtgttacggaaacattttgaggataagaccttaatcaatcgagctattcacttatcaaagcgaatgtatgaaccccgtaagcaatcaccgttagaacacgtaatggattatgatgtggagtttagtgatattgaacgtgcaatgtttaaggctcccatttataagctcattaaattagataatgcattactgcgtatgtatggaacacaaaaagctcgttacttcaaaattcgtaacggaaaaacctatttaaaagttatgaataacaaagatagtgtaaatgagctaaggcgaaccttgcgtagcgaaaaattacacaacatggttctagatgtattaaaacatcgatatggcaattggcgtaataaagtattttatattccagaaggtgttgagtatgccgtaccaacaactgcgaaggactttatcggcgagttgccatacatgactacctatgattttgaaggtaaaaatgtatcgctaggaattgcatgggacgaacctcaagctgatcttgatttacatatgatgtcattgggtggtcatcattatggatggaatggtagttatcagggagaagtaacttactctggtgatatgacgcacttaaatcaatatggtcatgcagcagaattctataaagtttctgcaaacacaattaaagatccacttgttgtaactgttaatgattattacagttcgtccgaagttaaatttgatgtatttgtgaccggtgcaaatgttgatacgcatgcaaaacaaggagtagcaacccagattggtgacaaatccgttctattccatagcaaagtatcaaatgacgataaatcaaagacactaatgctagtaattccgactaaaagcggctttaaggttgcattcactggtgatagttatggaaatcaacaagtacctggagttgataattccacaaaactactacttgaaatcttaaagaaccaagtagaacaacaatttacggtgaatgatctgattaagctcttaggcggaaagatcatttcaagccaaaatgatttggaaatgttaaaagaagatattactaagtccgcaaaggttgaaggtacatttactggtgcgaacaaacagctatataccaaggttagtgtaacgacgcctgaaattattaatttgagtccaagtaaagtaaccgcttcaacatttatcgatttgttgaaagaaccagaggaggataagtaatgggaacaatgatgctggtgtacatgattgcaccaatgattttgtttttagtaaatatcatttatggtcgaagaaataacagttggcttatattaaacggattgttattactgctatttgcaggtgtgacctttttacgggtatatattaatttaccgtcgcgtaatcttttgagtatcttaattagtaatggtttctggggaattatttatgaattaattgctctatcagcttgggatgaattctcaaacggtgataagaaagggtcgaagcttttattagggtgcatatccgtctgtgcaggtgtctttattattgggtgcatcggtgaggttcattctaagctgtcagttaaaccaacatggcaatcaatctcgaaacaatatagtaagtctagtgaagcaccaacattcaagcgtaatgaaacccctgtcgctttagcacctaatacagtgcttaatcgtgtacggaagtctatgtcggatattccaaacagtcagtacttcgatactccagatacagttcaagctcaatattataagggcaaacctgtttatattattccattgaaatataacggattcttcgcaatgcgcagagcaaaagaaatccctggatatttcatagtagatgcaactaatcaaaatgctgaaccaaaattcattaaaaaaccttataagtatgcaacaagcgcttactttaaccatgatgtagatcgccaaatttatcgcaataaccctgagtggcttacgatgagcaaaccgcagcttgaaattgatgatgatggcacgccttattgggtacaaacggtctacaagtcagaaacgtttagccaccgagttaattatcaacaattacatgtagtagtgatgaatgcacagactggttcacaaaagacttattcaataaagaacttgcctaagtttattgatgaagggatcacaagtgactcggcagcccaaatgaacaaagtctttggtaaatataagcatggtttctggaactttagtcgtacagatgttattaaaccaactaataacggaccggaagatggagtaacctcaatctttaatcgtgatggttcaattagttactttactgattttactaacccaaatagcaaagcggactcggcaatggggtattcaatgattaatgctcgaacgggtaaattaaccttctattctgcaaatggaatcatggatagtactggtgcaaaggaaaatgctaaccagaactataaagcacaacaatggaaggcaaagatgccagttctttataacgttaacggacgaccaacatgggtaatgactattctagatagttcgcatgcaattcgtggatattattaccttgatgcacaagatcagtctatttatggcagtggaaataatcctaccagtgcattagacgcatttcgtcaagccttagttaataatggtgcgacagctagaaatacgccaggcaccaagcaaaagaatatccagggtactgtcgatcgttcggttgtagtatcagataaaaataaagttatgtttacactgcaaggaagcaacattgtttatacagttaacactaatgattacgtaaaggctaacttaattcgtccaggagataagctgaaatttaaggcaagcgtagttaaaggacaaagtgtgggaaatgttgaagattttacaaatgaaagcttgagatgatgacaatgaatagtgcgttagaccttatgacgacagcagatgaagcaagagcgttatctaatacgaaaaagatggtaaatcaagctattaaaaatactgataaggctgttgaagaagctgctcgaatgggtaaaaagaatacttacttttatatgaataataatggggatgttaattatcgggcgcttgtagaagtagtggtttcattatacaaactcggctatggagtcaaagttttacttcttatcaatcctgaaattaaactttgctgggaagatgaagcaatagacatgccgattattgtaaatgaagaattgagtgaagaaaaaacaatgttaattgctgaaatggttgacgaagcaattaagcaactagattaaaggtgattattgatgaagaaaacattattaattcttggaacggtgttagtaggattttatgtgggatataaccaagctgaaccagtaaatgcgattgcggcacatggagttgctcatgctactgcgcatccggcagcacatccagctacacatgcagaagctactcatccgacagcaacacatacaactactgaaggtgaacacacaacaaccataactaacgataatcattcagaaactccaaacgctactcaccatacgttttcaacttggatgtatggtgtaacgcatcctggtggacatcgcggagatcaatatactaaaggctacaacgatggatacaagaatggctctgttgataagagaacaaagtcacacaagcattcaaagccacaaggaaaggtatcaaaatcttactataaaggctatgttcacggttataacgatgggatggaataggtgagaatatgattgttcaagataaagaagaaaacgtaagatattttggagcaattcagtttcgtgaagaaatagctaaaaagtcactagccttatatccgatggtagccgaaaacgaagaaattattgaaacgactaatatctttcctgaaagatatgcttactatacatgcgacgaccgtttagtaactgatggagattggatattaactaactcaaagggagagtgtcaagtggttactaacaaaaaattccttgaacgctttaagaaagtcgaggtcaattaatggatatcgtaaaagagaaagttcgaaaatataatgccgttcaatttgatcaagactttgtaaataaatacggtcttattaaatatccaatggttcatgaggctataagacctgtacaggtgttttctgaagccaaaaagggactgtttgggagaaaacatgaagtaatgcaagacgtgccagtatatgaaataactaaaaattattacatagacaatgtatttaaaagaaattctgttaacaatcgtacagaaaaatgttgggtaacaagtggtgattggattgttacagatgagtatggaaactctaaagtttattcgtcgaaagaattcaaggagaaatttgaaaaaacagataatcaggagggattttaatggctagttacagcgaattaaataaattaagtgaaatggtaaaatcacaaaaagaagcgttggcaaaacaaatgactgttgaagaggttatctccactattcaatccccgacgtcatcagttgaattcgaagtagcgatgcaggctttacaaatgattgacagcgtaaagacacaagtgccaagccgtgataaagtggctgaatcaaaaggatggtataaagaaccattaacaagttatcgtggagttgactttcaaattgatacgagcattttggataaattgtgggacgaagtaaatgaaaaataaacctaaatttcaagaataagttagccactggactcaaataaataatactgaccaattgattattggttgatggagctgtgatatctcttggtagaaggccttacgatagatatccattgacgaatgtccattaaacatagctcgtggatagtgattcatccaatcattagtcgctatgatctgagcactactatagttatttatagcttcacctttggtaatctccttgcggagaaaccggttattgatctcattggatccacgttcccaaggggaatacggatcagcatagaaaacatgatcgtgaacttgtgttaactcactaaattctgaaccgttgtcagaggttattgtcttaaagatgcgatagtaagcatctgtgcccattttctggcgtaaatttataaagaactgatttactgcatgcgcagttttaccagcaattttactcgtgatattaactcgtgaaaggcgatcagtcattactagtacaacactgtcattaccgtttttctgtccctgaactgtatctagttcccaatggccaatttcggaccgttggtccgcagtttgaggtcgttgagcaatattaggacctaagcaccttttagcttgcggatgagttcgatgatgcttacgtttaggcttttcaaagaggtctaaattggacgtacgaagcacaccctcattaatccattgatataaagttacaaccgactttgggatcagggtgccatcattcattaaatctcgagccttataaataaccgcttgtggggagtaatggtggtcgtcaaactcaccaagcattagctgatcagctaatcgtaaaaattgctttgaagaataatataagcgacgacgaccagaatggcggtgatgttcaagatatgtggcctgaccagcttcataactatagatgtagtaagaatattcgtaaatcttaccattagatttttgacgacgaagttggcggaccgtaccacggttgagctcgttattaattgtttgatgattaactcctaattggcgaccaattgcgcgattggaaagtccttgcgactttaaagtcgcaatcatcacacgttcttctttagtaagatgagcattctttttatgagtagtcaataaactagtagacatggtatcatttaagtgcgtcatttgacggacatcctttcatataggtttggttcacttaatatgatacctgatgtcacgccgaatggcgttttttatttaccaccaactgggtggctaacttcattctataatccaccaaatgaaaaataaaaggaaacatccccgttatccaaagcagaagggatcgcactacggaacacgtcctggaatatatttaatcgataaaactggtcataaggttaggctaaatgttacttgttttagcacagaagtattaagtaaccatttagtacttggcgatattgaatttcaagtaactgagacaatgttatctacaattcaaaataggagagagttgttctatgaataaacgaaagcgttacatgaagcggagattaactaaagcccacaaaaggggaacattgatcaactatcgattggattcaatcattacgccttcatatcaagttataaatcgctcggaaattattcaattgcaaaaacagattaattcattgcaaaaggtaattaagaatctttctcgtcgtaataattaaattagctgaggggatgcaggatgaataagaaaaagcgtaaggctaagcgtgaactaactaaggcgtacaaagagagaatgaaccgtcaacaaacgcacaacttacttgtagaagtgttttccgatccggtttttcaaaaaggaatcgaggcaatggttaacaattgttctcaaaactttagagaacttgcaaaaatttttgaaaaatgacgtgtctaaacgtgcaataaaatacagagttgatataattaatcatggttgaaggcagtgcataagaaagtgacatttcgcctgtacagaatgaacgtaagaccaataagccgaatatgttcgataggatatattttgcaaaagagctaattaatacctagtgaagtcgatgaaagaaagtcgattggttgtttgttctagaaaccaacattgaaattcattgcacaacccgttaggcgatcgtaatattaaacccacagtaaatcatggctggttaccatgagaaccaaagtgggaagccaagaagatcgtagcttgtgaagtctggcaaccagaatataactaacgaggttggtacgagtagcccaagagcattttcttacagctataaggaaaaatataatattagctcatgtcgagtgaaagttaaacggtaatagatccgtgttcaggtcttgtaaaccatacggagctatcggagttgtctgccggtagtgagcccgtatgaacctgtggcagaacagaatccaatgaaggtgaactacccaaaccaatgggcaaccatacatagaagcggatagcggtgtaaaaactgctacccgcttttttgatgtctaggaggtaacactagtgggaataataaagagtttttattacctaatgcaaaacaaattagacatttttcgtttggaggaaagctattagattgtcgtgaatcattgaaagaagccataaacaacaggtcagacgattatttgccgatccaatggtacacatctgatccgtataatgcggggcaagcggttactttgttggaattgtctaactatagttttcatatgtaccaccaaggtgagggaacaggctattcatttaccatcctaacttcattacgagaggaaatgcactatatcgatattgatactattgaaacaaaaacatttagaattcaatttgaacaaggaaaatatgatgcgttattggagctgctagaggctaataaagaaagaaattagagaacatgaaagaaaaaattcaatttgaagatcaaaaaattgatagtttggttaatatattaaggtcaatcgctttaggtaaaagtgatcttgatgacggtgaaattatcaaaagaactgttacttcacttaataattacgctgacttaatcatagctgacactgataaactcccaatcagtgatgaacaggtgagtatattaaagaacacaataaaagaagttgtcccgataatacggagaagttatttaactattaaagagcggtgcaataaagcggataagaataaggcgctagctacagaatttgcaatgaatttctgggaatgccataactatcgtgcttgtgtaaatcttttaggtatttttaatgattaccaagtatataaatacgctgatacaaaatacttaaaaattagtggtataggtgtacgtggagcattaactatggaaccttctaaaatatcaaatgctggtgaaaaattaattagtgatggtgtcttttcaatatcattaaagccacacgataatcatttgtatttagctaccgaatgggaagttgttactcgcgatattccgttctttaagaaatctgttacttttaatcgaatagataagataacttctaacgttataagcaaaatgactctaggagattataaagaagcaatgaagtggcttttatgtgcatgtgctaaggcgttaatagtcgttaaagatactagggaaccgttgttcattgaaccaaatccagtgaacttccgtaaatatattgtgatatcagaggcccgctaacgtgaatatcataagagctaaacaccagtccaacaataaaaaaggagaatgaaataaatggaacaaacaacaaataagcaaaactattttaagtggttacttggtcaattaaaggggtggcctcttcaaaattatttgttattctggtttagttttggttttcaattggctttattaatccaatcaaagattacaagtgttacgctgattacttttatagggacaacacttggcgtgctatgcgtactagccatcaatgccgctaaagctctaaacgggattcttgggattcttagcgctgcttgttttatttatgcaggcctgtctgcaaagaactacctatcaatctttgaacaagtagcttatgtattaacactggacttgccggtcattttagccgtacgttcgtggaatgatgatactaaaaatcatcttcgtaaatttggcggtaagcaatggttaattgcaattgttggaacattgcttgtatatgtaatttctggatatttgattggtaagttaactaatgacccacgcccttggattgacgctattagttttgcgattagtttaacagcaggaattatgtgtttcatgcgctacaacaaccaatatttctggtggttagcttctggaattttccaattaattctttggggtattacttatgcgcagggggatgcaacactagcgatggctattaatagttctatttatgtaatcaatgatattctcgcatttacggtaagcccttggtttaacggaggacgtaagaagttaggcttgaatgatattcaataaaataggaaacggtgatgcacaaatgaaagatatcctcactcatgatgaaatgaaagaaaaaattggaaaatgtcgaaattccagatgaaatcattgatctagtaaacgaaactttagaatatggaattgctactggagccaaatttgttggaattgaaataggatcaaaagaaaggcagataaaggataaatatctaattgccttgactagaagattaggtgagaaaaattataagtcagatattggaagtggtcatttttatattacgctggatagcgcagataactctcaataagaattgattatagaagcaatccaaacaacccacaaaaagcacaaatggttttgaggtgaagatatggaacaattcaaatttatttttacatctataattcttcgcaagtataggcggggcgatacgtatttatttgtacctaactttaatgactatttaggtattccagatagtgagtatgaaaattttgctaggtacttgaaagaaaaacatatttatatgacgagtaagtcaaaaagaaagttagagggtaattatgtaaaggcagaacactatgatgttttaatcgactggaatcacgacctaaaggcaaaaaagtgcttagaagaattggagatgaaactaaatggatgagtggctaaaaatgcatacgtatattgtgtgttcgactaaatcgatggcaaaagcaaaaatgattgatgattggaatagttttcctcgtattcaactatgtaaatcattatggaatattcactattctcaatataagattgacaatctatggcgggtatacaaatatgtcagtttgtatcaagttttacactattttgatgggatagataatgttgatgagtttagaatagatgaatcagcaagtttttatagtttgagtgatacaaaaaaggctgttgaaatattgggtaatgcaggaaaaaagcgtgatatccgaagtaaacaatgggctgaatggtgcaggaaaaatgactgtaaagaatgagagtactaataggtgattaacgatgagccaaaaccagattatacctaaaacggttgtattggataaaatgatgaaggcaaaattatctgaacaccttgtaaacaacataaacaataaaatcttaaaagctcctaagcaagagggacaaggttttagtattcgatacgaggatggattgacacaagaaaacaatatgagtgttgtcaatcaattacgagcagctggatataacgttcaaatattttatgctaacggaaaagttgccgaactttatgtttactaattctaatcattatctaaaagtacaaaatttctataaagagaattagaataaaaaatcttttgctttaatgcgtattaaggcgtataataaggctgttaattacgagaggggaaaataaagcaaatgaaagtgaaagagcttttgcgaatgttagcccaagaagaatttaacgaaaaatatagactaggttctcatcactattttgagagcaggaatggtaaacatcttgttatttgttataacaatacaaatgatattattctttctggaacctataagtctattgttaagttcttaaaatgatctattgctttattatttctaaaataaaaagagactggtttttcagtctctttttattttgtgtggatttaatgcgcattataggcgtataataataaagcctgctcctttgtcttaatagaatcgaggtgattgattattgtcgaggtaaaggcaaaaaaagtaattaaactattgcgtgataacggatttaaggaagttagtgttaatggagatcaccataaatttgcaaatgcagaaggaatcgtgactgtagtcccatattcccaaaaaggtgacacaatttacccaggcacactaaacgcaattctaaaacaaacaggtttaaagaataagtagtttaattcatgccagcaagatgaagggatgttagtgccagctagcattccttttttataattaaaattgatttcgaaaataaaatcaatatatccacaaaaattatactatttttagtaataaattgtttgttttaggtaaattttgttgctttaatacgtattgaggcgtattataatcgtgtaaggattgaaaaatttcattttagagaggaattcttgtatgaagagtgaaaaaaggattgtagcataccctgctattttagatgattcagagaatccaaaggggatgtatactgttacattccctgatgttcctggagcaataagccaaggcatgggagtgccagaggctatggcaaatggttcagaagcgcttggattaatgttatataacgaagaaaaattgccaaatgtttcagatataaaagaaatacagaaagaaaatcaaggatcattggttacgatgattttttctgatttagctgaagcaaagaaacatgttaaaacgccaatggtaaaaaagaatacgacaattcctggagatttagcccaaaaagcagaagaagcaggaattaacttttcaaagactttaacagaagcgttagaacagaaattaaatagctactaatatgatataaaggaaatatttagaaagagctgcaactataaggcatttaaatataaaaaagtagataagaggcgcaagacacgcaggggctcacgcctcctttagacattgcctgacgcttgatttcaattattatcaaaaaagtgtgaatggagacatgaagctcacctccttttagtagtcgtaagtcacaacttgctgtgataggctacgttaagaaaggagtgtgagcttcttttttatataaatagcaatgcctaatagttttttggggatgatatagtgatagagtggttgggaacaataccagattggattgcagcagcaatggcattttggggactaaagatagccaatgatcattttaataaacagcctaaggtaagtttaagtatagaatttgactcctatcaggaaggaaataaagaaaaagaatataggttttgggtggttaatgatagtaatataaatgttactgtaaaatggatgggactccgaatggcatcaaataagagtgtacaagaagatgaggcatactattggagatgatgttgattggcatttactagcacctggagaagcaagtaagcctataagtgtaaaaaagagcagaaaaagcttttattgtagaatctttaaggtagaaagaaaattaaacaatatttattattgctagcaagttctaaatatcatcaattcttaagaacgtgtcgcgcaaactggtatacgataattataagctaacgttagcgctacttttttaaaaaggagtgttaaatatgaaaactaagtattccagtgttgaagaatatattcacgatatttatgataatttatatccaagagcaagggcagcagcggatctattaatcgagaaggggactataactaagtttgattttgaggaaaaagggattaacccagcagtaggtccaagagcagtaatggatttaaaagatcatggcattcctattgagaagccaggtcgtgttaatgtaccacaggctaagcgtgcggttgctcaatataagcttggcaaggttgctaatttacgtcctaaggaaaaatacggtcgtttggtacctcccacaaacttaaagcgtagattaattgaggttagtggatcttactgtgtatattgtgggcaaaggttccctgaaaagtcattacaaattgaccataagttacctgttaaatattttggagagctaccatcagaagagattgctaacttagataattatcagcttgtgtgtggacattgtaatcgaataaaagctgaagcaattaaccgagaatgtacaaaaacatgcttcaaaacccatgatatgaacattataaaaagttgttattggtatgatcctacaaattatacccacgtttgtggaaaacaagaaagacgactctctttaatgtttgttggggaggaaacaaaactgtatgataagttagtaaaagttgcacgaaaagaaaataagacggcacaagaagtgataaaagagttaattacaaagtaaaagacgtgaaaaagcatgctttaagtaagtgaaaaaagcatgctttaagaactagagagtgcagaaaaagcatgcttttcggatctagtaaaaagcatgcttttttgaaggcttattttccaagtataaaatcataattttgcctcaaaaatcgccttatttattttcttatccggttttaatgttctactggataaaatatccggctacttttaaccggctttcgttatctttatagcacggctagcgcgtcacgttcttaataaatagaacatgatttctatttattatatagtagaaaagttttttattctttttaattttattagttgacaacttataaaataatgatattatataagtgtaagctaattactagcttaagcagtcccaactttcaaattctagatatgaaaggagtttcggggctatgcttacagtagtaagcgcccttttaggaatagccggcgcctatcggttagcctgtaaaggctataaagattattggcaagggcaacgtctaaaagaaaaagccttaaaaaagcgggctaaacgcttaaaaaaggctaacaaataaataaaacttataaattgggaatcgtggcgcggttcccttttacatatataattatactatggaactagaaaaatagaaaggttttagaaatgctgaaaattctatttaatatagtaattctgttagttgggctatatgttagctatcgattagttaaatctggatgtaatgacttaaaagaagcccaaaaattgaggcaacaagcaaaagggttaaaaagaaggcgataaaatgccaaaagtaaagaaatattctaaagaagaagcacaccagcgacaaataaaccgcgtaaatgaatacaaccgcacacataaaaaagaagcctaccgcaatcaaaagaagtcaagagcgcgcaactttattaaaaaggacgctacacgggaagaattggaagaattacgcgggcttattgatgaaagactgaaagagctataaaagtgcttatatatgtttgaactcactaacacgttgttatatacttctattaaatgctaaagaggtgaaatatatggcaaaagcgagccaagcacaactagaagccaacgcacgatggagagcaagaaataaagaattcaatgactataagaggtcgttaagagaagttcacaaatggataaatccagaccccaaaaaagccccagcagtttataaagctgtcaatagtacagatgataggatagattatattggcgatttgaaagatacaaaacgcgcaatagataagcgattaaaagaacttgaataaaaaagttgaaaaaatttcaatttttttattgcaatatataacacgatgttatattataaagatgtcgaaaggaacaagaaaagaaatgagatgataaaaaactggacgaataaataaaattttaatcgtttatataacacgatgttagaaaaggggtttatttaagatttgagataaaaatctagtatgttcaaaattttttaatttcactatataacacgatgttataaaagaaaggaagaataacaatgacaaaagaacaacaaaccatactaaacaaagctaaaaagatattcgatcaagtagaaggatattcaaacgaatacgagttaaagaaggatggtgcaacagtcgcaagaatgaagctagatgacgaacaaacaacgctatacgacagtaagcaaattaaaagctttcttatttggtggaatgatgacttgagcggatttagtgaaacactagaagaaatttacaacggctagaaaaggagatcttaaaaatgaagtgtaaatattgcaacgaaaaactaaacaacggttttaatgtaacggggtatgaaatgacatccccaaagcaggcggaaggtctaaagttcgattctctttattgtatgaatgaatacgcaaaagaacataatttcagcgactacaattatatttcttgtgatttgtaaaaggggatgtaagcaatgcgaaaagtagaaaagtatatcaagttgtatcaagaaaataaaatcactgtacatcaggcctataagcaactaggcgggcgaaaatatcgcgagttttggaacaaactatataaattatcagtaaaagaaaactaaccaataatgaggtagatactatggaaatcaaaattaacagcgaacaagaagaattttttaactatctagaaagtgatagaacaatccaagaagtagcctgtttatatgattggagcattaccgccgacagatacgcgcttttaggtttggtctatatgcaaaacaaaaacaatcgattagggaaaagaattcttgagtatttatgtgagtgtaattttcacacgtcacatgaagcactagaaaatacagatggaacagacttacacgactatttaaaagcatattaaagaaaaacaactaacgaaagaggtaatcactatgaataagaattcaattattaaagtattaggcattttattaattattgcagttgctaactggtacgttgacagccaaaagcttcacgacgcacagaaccaaattagaacagaacaaacggccaagagtaaggcaaccgcacaagtagaagacctcagtgcaactaatgacgatttaacagaccaaaacaaggaattaaaggactcacagacccatattaaggacggccaacaaattaaaaatgataaatttacaatcgactatgaagacgatggcgacggtgattatactctaacagtttacccgaacaagaagaatgaaaaaatgatcgcacagcaaggggacggcgcgcaagggttagaaattgtaaatgttccaaaaacggacaagcgcacaactacagccaactagaagggaagttataaaaggggttgaacatgatggatattacaaagttaagttactcagatttaacaattaaagcattaacgctattagatacagatgataaagtaagactttacttgatggaagccacgcgaattatgagggctttatatgaaagtgacgccgtatatacacacgagcgccgagcattcaggcggaactattggcggtttgttctttgctgtaatttaacgccgtcaataaacagaataacagcaacaaagatatacgcccgttttgttggtggttactgtgaagggttagaacctaaaacagttcaaataatggggatactatttgaagaactagctcaaagcattcacaacggcgaaaacaagcaagcacaacaagcaatacttaacaacgcaattaattacctactaaagtactaaggggatgcatacaatgaactataaaacatattatcggactgttaagagtcacgctttgaagtttgttgatcctggagatgactacaagcgccgttactttgcaagccgtgacgattataaaagtgtactgatgaagttgttagcttcaaccgttgaccgtttgaacgggctgggagttaatataaaaatagttgtcggggatgacaacaacaagcacacagaaacaaaagaagccgcctaatcgggcgacttttttatttgaactaatttattaaaatgtatttactttctatgtatatgttatataatatagttgttgagtggtacggagcaacggccaattaacacagatctgatattgggaaaagtagaaagcgttgcggaattctaggcgggtgaaactaatggccaatagttcacttgctgaagtcctaatttcaggagggcgggcgccgtgagctccggcgactggatcgcatatctgaaattgatactagatgaatgtttagtattatatcagatataccgtgaccaacaaaaaaggcgttaacctttacggctaacacctaataaaacggcttcctgatattgggtcagcaaaaggggtgggcggtgcaacgcttgccctttttgaatacatatatattatatattatttgcgggaggttgtgcaagtatggcaattacaaaagcacaagcaaaggcaacggccaaatataaagcaaagcacccggaagcagcaaaagcatatcaagcgcgatcatatgcacggcgatatattaaacagtatgcagataatgaaggacttgacgaactggagaagcttatacatatcagacgagaagaactaaacaagcaatagaatactattatttatatatgccatctatctattaattaggtaggtggcttttttgttttaaatcctcgcggaaaaaatgcggaaaaataaaggggcttttagtgttatattgatattgtcgaaagaaacgaattaataaggtgttacctcaaacggtagcgcctttttattttggcttgctttatattgcgatgtgatgacgtataaggcaatacagtagcaagttaacagaaaagattaataacttaattaaagcgttagaaggggagtagatggaacacaaatataaagataattacaacgcattttatcattcgaaagaatggcaagcagtaagacaacaagtgttacagcgtgataattatttgtgtcaggtgtgcaagcgagcggggcgaataacaccagctacaacagtacaccatattaaagcggtaagggttgactatagcaaacggctagaccctaacaacttagagactatctgcaaagcttgccacaatgccgaacacaacgaacgtacaaagtcgctacacgataagcagaccaaactaaaagccgaaaagaacagtgatatttttacattcaaagccaatccggagctttaacccaaaagcgcacatgcctataaacgccgtcacagcaacgattaaagcggtctgaaagtaaaaataaataattttcgtgtgcaaaaagtgcaaaaacaagccccccacccctaaaaaatagaaaattttaaaatcactggagcgatgccatgccttacttcgtaaaaaactcgtttttcaaaattttttgcacacaaaaaagcggacacccatcaccggatgtccgttaattttgaccactcatatttcaactaaatcataacataactaaaaatagcgtcaagcgctaaatttcggtgaaaggaggaagttttgatatgccacaaacagctaaaaatgttcttcaattagttgcaaatggtaactacaatcataagccaaaagatgagttagaacggcgtgcgaaaaatgagcaaaaattaaaagtttctgctgaacatatggatccaccatcttatcttgatcctggagccaaaaaacagttccgagcaattattaagctattcaaggatactgatttgatgaacgaggctgatattgacgaaattgcacgttattgtgacttaacgaaagaatacaaatcgtgtaatgcacggctaaaacgaaatggtcgattcgtagaaggcaaacctaatccagatttacgactgaaactgcaaatttcggcagaactggataagctagcgaagaacctcggacttaatcctgcggcccgagcatcattagctattaacatgacagataatcaaaatgaagaagatgacgatgagttctaatattctaaaagaaaatccgctaggccttaattattctggtgttgttgaatggtcaaaagagtacgttcaacacgaaaaggacctgggacacgtattggaacaaccagcccctattcttttaaccactatctatgctgaattagtggtaaatggcgatatcactaccggaaagtgggtaaaattagcctgtgaacgtcatctaaaagacttaaaacgttcgcaagaagatcctgactatccttgggctttcgatgaagaaaaagcgtggcgcccaatccgattcattgaaaagaaatgtaagccatcaaaaggtgattacaagcgattagttttgcaaccttggcagcatttctttgtcggctcaatctttggttgggttgataaaaacactggcttgcgaagataccgtgaagccctagttttccttggtcggaagaatgggaaaaccactttggaatcaggaattgcagactacatggctggttttgaccatgaaaacggtgcgaatgtttactttttagctaactcacaaaaacaagcaagtattttgtacgaagaagcccgtaacatgattactgcatcgccttggttatcgaaaaaatttgttcctaatcgctctgaaattcgctttcctgaaactaacagtaagattgttgcaatgtcagctgaaaagaataacaaagatggggaaaatcttcattttggggtgtttgatgaaattcatgaatatgaagattattctttaattaacgtcatgaaacggtcacgtggtacccggaagcaaccgttaatcgtctatattacgacagctgggtatgttttagatggcccattagtggatatgattgatcagggccacgatacccttaaaaattatgattcagacattgatgagcgaacattttattatctcgcatcgctagacgagaaagaagaaatgaatgatccttcgctatgggtcaaggcaaatcccaacatctgtatgatggatattgctggactaatcactgatttcaaaaagaatcggcgagtccctaacgaattagctgattggattactaaacaattcaatattttctcggaagttgatgagttaagcttcataactcctgaaatactacaaaaaaataagcgtcaccttgatttgaaggaacttttaggtcgtgaatgcgtaggtggatatgatctatcagatactgaggacttcacctccgcatgcttagaatttcctttagatgatggtggcgtttttatattggaacattcgtggattccacatgctcggtatgaacgtgataagaatccagaacgaattaggaagtgggaacaagatggggatattacaattattcctggagactatgtcgattattcatacgtgcttgattggttcaaggaacaatcggaaaaatacaacatcgtaataattcgatacgattatgctaaggctattcggcttaataaagaactgattgaagctggttttaatacagaggtagctcgacaaggctttaaaactttgggaggaccgctccagaatttcaaagaacttcttttagacgggaaggtcgtatttaatgaacaatcgatgtttaagtggtacctaaataatgtccatctccgccaagatcgtaatgataattggttgcctacaaaaacatcacaatcacgaaaaattgatggatttgcggcagcactagatgcgcatgtatcagtgattgatatgttagtagaaccaacttatgacggtccggtctcaacgtttatttcattcaagtaggtgaagaaatgaaattattagtatggtttgccgttgctttaacggcttttttatttagtgcaaagttagctgggctagtcacttgctcatggttagtgatttttacacctttgattattgttcttggactatggtttttatttttgctaatggtatttgcaattattggtatttatgccttagttgcaatgatgagggaaaagtaagttaactgaattagcggaaaggaggtgcaaatatgggattttggaataacgtaaaacatttattttcgactgatccacagcaaaaggcaagttctggtgattgggaagggcaaggctttcattttagtaactgggctaacagtaacttttttggaactcataacaatatattgcgcaataatgaagaagtctttggagttattagtcgtttagctaacacgttatcaagtttgccgatccatgaatacaaggaatacgaccaaatcaacactcctgcatctgatttattgcatggtgaagctaatccttcgatgtcagcattccaactcattaatcaattagaagtatcgcggaatacggacgggaatgcttatgcatggattgaacgtgacgataatggtgccccaattaatttgtggccaattgatccgggtgcaattactgttaaacgaaatgttgatgacaattctatttggtatgacgttaacagcacagagtaccatttcttagtctttaataccgatattattcacgtcaaacacattaccccattaacggggacacttggtatttcgccattggatgtgttaaaaggaccattaaagttcaaaaaagcagttgaagacttctcgttaaacgaaatggataaaaaagatgcatatatcattcaatatgatcgttcggttagtcctgataatcgacaagcgttaattaatgattttagacgaatgattacagaaaacggtggggcagtcgtccaagaaaaagggtttgagatcaatcgttttgatagtaacttccaaccaagtgatctatcaacaacgaactcaatcactcgttcaagggtagcgactgcctttaatgtacccttatcatttttgaatgaatcactggagagtggcaacggaaagtcaaatgaacaagtcatgctgcaatttgttgaaatgacgttaattccaattgtgacgcaatacgaatcggagtttaaccgtaaattgcttagtaatatggaacgatctcaaggaatctatttcaagttcaatattaacggtttgcttcgtggtgatacctcttcacggacagcgttctaccaaacgctgatccggaatgggatcgcatctgctaacgatttacgaaaattggaagaattaccaccatcagacgctaaaaatgcggataaattatggattactggtgatttatacccaattgatacggatattgcagatcgtaacagcaaaaaaagtactttgaaaggaggtgacaatgatgccacagacaacagtgattcccaaatatctgacagtaaagcaggaaagcaagcagaaaacagcgtcaatgtatatcgacggcgaaatcgtaactgacgaatattacgacactgatacctctgcggcaggttttcgggatgcattaaaagatctgggtgatgtaaagacaattaatttacatattaattcgccaggtggttctgtttttgaaggaatcgctatttataacatgttgaaacagaataaagcgcacataaacgtctatgtagatggtttagcggcgtcaatagcaagcgttatcgcaatgagcggtgacgctatttttatgccctcaaattcaatgttaatgattcataacccttggacgatggcagtcggaaacgcttctgaattacgcaagcaagcagatgatctcgacaagatcactgaatcaagtattcaaacgtatctcgatacagcaggtgacaagctcgatgaagccactttacgtcaattaatggatgatgagacgtggttaacagctaaagaagccgttgaatacgggcttgcaaccgaagttattgagcctaataaggctgctgcttcgattagcaaaaattttgctcaacgttatcggcacgtccctgaacagcttattcaagcttcggttcaaaaacaacaagcaaaggttcaagaagacgatgaagtatttcgtaagcaacttcttgaacgataccagaacaacttaaaggcaattaataacgaattgcaaacaatgaaggaggaacaaatacatgaatttttaccaaattaagaaaaacgccatggatatgggggatgaagttcgccaagccaatgaaaaattaaacgaaatgcttgctaacccgcaaactccaacggaagatattaaggctcaacaaaaggtcgttgattctgcccaagaacgttatgaggttgctcgtaagcaaatggaaaaggcagaagcagaggctaagaagaagttaaaacctaatagtgaaccaagtcaattatctgaaaaggaaaagcgtgcgaaggcatttgctcaattggttcgtaatactatggcaaagcaagctgtaccagcatctgtgtaccaagctttaggtgatgatgattcaactggtggtaataagttcttacctaagactgtttcaaccgatattattacgggaccacaagaacataatccattacgtgatatttcaaccgttactcaaattactaatctagaaattcctcgtctctcattcactttagatgatgatggatttattgcagatggtgacaccgctaaggaaattcaagctaagggtgacactgttcaatttacccgtaacaagttcaaagttaaggttggactttctgaaactgtattacttggctcagacgctaacttaacagcttacgtagaacaagaacttactaatggtgtaactcggaaggaacgtaacgtagcctttgctgttaacccaattaaagctaatgaaaagcacatgtcattctacgatgacactgttggtatcaagaaggtaactggttctgatctttacgatgcgattactaatgcggttgctgatcttcacgaagattaccgtgaaaatgcaactattgtgatggcatacaaagattacttgaagatcattaagactcttgctaacggttctaacactttatacggtgcacaaccatcagctgttttgggtaagccagtagtatttactgatgcagctactaagccagttgtaggtgacttctcatactcacaatacaactacgatatcaatactatctatgaccaagacaaggacgttgacactggtattgaaaagtttgtcttaactgcatggatggatcaccaaattaagctttcaagcgcattccgtattgctgacgtacaagcgtcaaaatagcttccccatccggtgatgatgggaagaacacaaccccatcaacgccgaaaacaggtggggacacaaatgagagtcaaaacaaacctgcatctagtgctgtagcaagttcagctccatcaagctcgactacaagcgatagttcttcaactgataagtcagctgcttccgcacaaccggcagtagctgatactttcaatcctaatggggatgtaaaaccaactgaaaatcaaactattccagaaattaaggcctacttagatgcacataagattagttatgcgtcatctgcaagtaagcctgacttattagcattggttaataagtagcaataaaaggtggtgatatatatgtcaatcgaattattaaagaatacagtaagcgatgatgatctgggccaagttaaaacttctcttcgactagaacctgatatggaaagcgataatgtgctgttaaaaatgcttattaaggcagctcgacgggatattatcggccaagtaggtgaacgtattgatgatttttttgatgataacgaggtatttaatgccgctgttattcttgaagtttctcatctttataaccatcgaagtgctactagtgaacagcaaacttttgaggttccaatggctctgtattcattaattaattcaatgaaagatgattatcgctaccaaatcgctaaaaaagacggatggttagatgactatacttctggtatcgcagacgccgagagtagtaatgaaacagcggcagattccgaccgggacagcaatctaacacaagaggatgatcacaatggttaaaaacgtaaatgttgccagaatgcgttaccgtttggaatttggtattgacgaacccaccggaaaaaagaatccaaatacggggaaatcaatcaaaggtttcaacccacactttagtagatatgccgggttatggacgttaagtgccaaccaagcaataacactagcaggggcacatatcaaagaggctgttgtgttcttcgttcgtcatgacttaaaaatcacaagtaattataaaatccgtaaaggggacgaaatctttgttattgataacatttcttatgatgacggtctgagcactgacggatttgatttaattacttgtcatcgggaggttcttgaccatggctagtggtttaattaacgataattttgataaatttttggaaagagtagatcaaggttttactcttagcgaacgaaagaaagtaaataaggttggagataaggtttacgaagacgctatggatgcgtttttgaaacaacacaaacgagacgttgtgtataaaaacggtacacagcatttggcggatacactaacacatgaaattaaagaagacgggcattatgagattggcttctctaagaaagggaagaaagcttatatcgctcgttttttgaatgatggttggaagccacgaaaccaatacggtggtccttacggtacggcaccaaagactaaatatagtgagtggcacgactttattgctcgcattggtaaggaacgtgaccatgaaatgggtaaacgtatggctgaacgagcaaaagaaatcatggatgaaaaggtaggcaagtaaaatgactcctaccgctcgaatagtgggcttgttaagtgataatgctgacggcttggaagatatccttgtcgacaatatttgtgcctacatgattgacgaagaaaacgttgataatacacatccaattttggttgtttcagaagataatgacggtcaacgtgacgtgggaaatgacacaattctttcgactataaagcgaatatcaattatgttttactacccgattaactatgtcggagatatggactcaattgaaaaatcagttgagtcctttttgtatgctcacaaaatccgtcgttatctcaacactggtcacgttttgactccagatacaaaaaacataacgaatacgttgaaattcaactacacacaaaacgaacttacagaggaggacaactaatggctaatatcggtcttaaaatgctctacgttgcattgaagaacgaagatggaaccaccattgtagatgcaactaaaggcctttctgaagctggtgtttacgcaattgataccaataagtcacaccttaacttaggtgcgcaaactgctaatatttcagcgctttctggaacaccaacaaagattaacggtaacaatgaagtggtagatatttctaatccaccttcttcaccaactgttgcaattacagctaacttaattaatccggaagttaagcaaaaactgcttggtcgccaacaactttccagtggtatttgggtcgactctgataagcctacctatgcgggattgatgattgtttctcaagttccggtaacattggaagatgtttattacagttttggaatgggtatctttactgaaacgacgcaaaacgttcaaaccaacacagatacagctgaaactcgtgaaagtgataccttaacgttcacttccatggggtactcttactttaatggaaagaactacggctttgatcgtgccggacgagatggttttgataagcaaaagcttttcgatactgtcttccctggacaaacctttgtgacggcaagtaaggatggtactcttgatcctttattacatggaggtcaagtagttgatgtccgaactgatggtgagaaggcagctggcgtgggaaaatagcaaccccacaaccgagtggggcgcccactgaagtaattaatccagacggtagctcaactaccgcttaaaaagaaataacagagacgagtaatagtgagacgtaactaatacatagacttaaatatagaaggagttttaacaatggcaaaaacagtaacattaaaggcaactaacgtacttggtaaagatttcacaattatggactcaatgggaaacatcaagaaaatcaatgagggaattaagcaaatttacaagcgaattgatgctcttgaccaaaagaaagaaacagtcctttttgctgaatataacgaagtaattactgatgaagtaattaagcaagttgctaagttattagaccttagcaaggatgacgcaaagaagctagaagatatgtcatacaacgacttatttactttctattcaactgctgttaacgaatttactggtatgactactccaagtgttcgtgaaatgcaaaagcgtcaagaacaagcaatgcaagctttaagtgctgaagacccaaaacaaaattccgaagattagttcttgatttagacaatctcaccgaagatatcgactttatggcccaagaagccatgagtaacggtattcttcctagtgatttttataaatcatcatttagcgatgtgatggcagcacaaaatgctaaatcaagaaaggatcgtccgcaagatccattaactttggttggctcagatgcctttacattctaaaaaattttgaggaaaggaggaaaatagatgtctgtaattgaagggtatacatttgccgttgatatgcaagatcgtggtgttgtagctagtttgcgccaaatgcgaagtgccgcaagtgcaatgaaagctgaaatgcgtgccggatttgaaacaattcgacaaggtgaaggttcaatttctgcatataattttaagattgaacaatctgagcgacagattgaaaattataaaaatatacagaaagaacttcgtggagaactagaaaaactttctaaagcacgtgaaaagcaaattgaagagacgaaaaagtatgctgatgctaattcggaagaagcccaaaaagttcaacgtgcttttgacgaaactgaaaagaagtatgctagtaccgctcgtcagattgaaaatgctcaacatcaaattaacaaattaactcaagggattgaagagtctcgaaagtccattctccaatttaatactggtctagctcgtacacgtacagaagcgcaaagtgttaaatcagtaatggatggttatgttagatcagttaatagtcaaggaaatgcttttcgtacagctaaagctcaagtagaatcctacaagttacagcatggagcattaattaaccaatttcgagcagaagtcagtgaaacaaatcgcctacagtctaaagtaaatggactacgtaatagctattctcagcaacaagcaaaagttaatcaaactgtacgtgaacatggaaaagcatctagtgaatatagaaaagaagcagctgctttagttgggctcagtgaaaagattactaatgcaaattcagaatatgcaaagcaaattactcaagcattgaaggtacgaacttcaatcaacgaaatttcacgagcagaactaagcgtcactgatagcggaatttctcgtctaagccgtgcaatgaataatcttgataccaatgcgcgtcgagctacttcacatacgagagaatgggctcaatcattacgtggtggaattatgactgcatcaatggcgcttgttccatttggtgctgctgttggtaaatcagtacaaatgtccgctaatttacaacaatcgtgggttactactggaaatttacttaaatttggtgctaaatcagcaagtgaagctgcgagtgaagttagaaaagtaggcacaatgcaacgtgatgctgctaaattctctaaagaatatggttactcacaaaaagatattgcagatcagtacacagagcttgtaaaacgtggttattctgcgggacagtcaattggttcaatgaaatctatgttagaggcagctcgtgcatctggagatgattatggggatgttgtacaaaatgtttctaatgtattagatgcgtttaatctacggcaaggtaaaacatctgaacaagttattcaaaattcaaagcgagtaactaatgctatggcctatgcagctgatatgacggctacagactttaagaatatgggagaggctatgcattatgtatcagcttctgcaagccaatctggtcagtccattgaaactactacagctgctttaggtgaattgagtaatgcaggattagaaggatcaatcgctggtactggattacgaaaagtgcttaacagtttactatcgcctactgctggcgcaacagaggctcttaaaaagtatggtatgacgatggatgactttaagacaaagaaaggtgctttaaagcagcttcctgatattatgaaagttatcaataagcatactgaaaatctcagtaaagccgatcgtggagcattttttaaagctgtgtttggaacaacgggacaaaatgctgcaatgattttatctcaaagtgctaatgcgatggatgatcttattcaaaaggaagaaaaggctgaaaagaccaattatgttcatcagttggcacaaagaaacatgcaatctactaaaatgcagatgcaacagcttaagatgaatattcaagatattgcaattaatcttggcaataagcttcttccagctgttaatgatgtagcaaaggctatgagtaattgggttggctcaaaagatggtcaaagagcgattggtgactttagtaaaagtgtttctaattttgcacgtgttattagtcataattctaaatcaatcttttcatttactggtggctttgttgaaggctttactgcagtctttaagattagtggaattgttgtccatgcaattggagcagttggagaagcaattggtctgcttacaaaaaatgtagaaaaagcacttggaataaggcaacgaaacataaactttcctaaatacttaggagaagtaaccggtggagtaattggtctagttacagcctttaagattcttaaaggaacagttaatggtttaagtgctctgaaacaagactttttaagtttgttccggattaataaggaaaacgataaaattaagcttgaaaatcatgagcttgaacgaaatgttgcactttggaaagaacataacttggtttctggtggagattcagctattggcaacgctatagaaataccttctaaagaaaaaggcgctgcaagtaaaattgaaaaggctgaaagagatgttcagatcagaccgtaccttgacgaaacaagatcatcgagaatttctaggtggttttctaatgttctttccgattttggtaaaaagggtggagaaaaagctggtgctaaagcttcaacaggatttttaagtaaatttaaatcgttaccaaacttaataaaaaaagcgggtatttttgggtcaattatagactttggcatggtagcattaaccgccttagatttatccaagaatatttattctggtttaacaaattcaaaagcgaaaagtcgttataaggatgctggtaagtcaatggcagaagggatcggttggtatttggcgggaccatttggtggtcagctagcatcattaggaacggattgggcttacaaaactactgattcatttaagaaggggtggaatggttataccaaaaactataaacctcgtggatttgtggctactgttggctgggattttaaggatgctacgcgaaaatataataattggattgcagcaattgaaaagaaacacccagttatagcaggttatttccgatgggaacgtggaacatttaatacagcatttgctacattaaagttctttgctagaaatgtccatgctggcttaaaggaaatgtgggataccattgctgatttaggcacattgaatgtgaaacgctggaaatctgatatgggtagagatgctcgttcagtgattaaaggagttaaagatgattggcgtggattcttcgattggtttgggaaaaatcgtcagaaagaaacaattcacaagccaactcgcaaacaatcagtttcttctaccactgacactcataagtcgacgtcagaaaataaagttaagtctttaggaaacactcgctactctaagtctgacgtacaaaacttaaaagctatgacggctcaaataggttcatatgaaaaaacgttgaaagggttaaagggtgttattaaaactaatgatccaacttctgaacttcgtcatatgaactctgaattaaaaggtgcttcaagtaattgggggaaggttgctaaaccgattaaggaaattggggatgcttttaaataccttagtcggtttactaactcaatggctaaaaaggatgcttttgcagcatttaatgatgacttacctaaactagatgggactgttaaaaagtacggtaaaagccttataaaaaacattgatagtctgggtaagagcttaaagaataattctttggagaaaccccttaaaaagattagtagtgaaataaaagattctacaaaaaagtggaaagaatttgcttcacctgttaagtcattatcaaaatcttttaagacgctacaaaatgcaactaaaacattagttggaaagaatggacttgaagctaccaagaaaggatttacagatctaaataatgctcttaagaaacaaaaaataggtgcttacattaagaagttagctggagatctaaaaaaatcaaaagttactacttatttaactagaatggataagagtgttaaaaactcggcgaaatattggcgttcattagcaaaaccgcttaaatctttagcaggttcatttaatacattgcaaaaatccgtaagagggttaaatggaaagaagacaggttttactgcgctaaattctgatattcgtaatctttaccgtaccattcgtaagaatccatttggccgacttattgctcaacaggctaatattgctaacaaggcgatgagcggtaagaagtctggctttgttaatgaatttaatcgtcaaacacgttcaatggatcgtgcattacgttcatttaagcgtgaatttgatcgcgattggagaagtacctggtctggattagatcgtccagtaagtcgaaatttaggatctgctagtcgttctgtagataggtatcttgatgatattcaaagtactcgttctaagtttagtagttcatttcttaaaggctgggatagttggattgatgatgttgtaagtaatttccgtaaaggatttgataaactccctggatatgctcaatcatcaatgaaagatattattagtcgcttgaacaaagggattagcggtatcaactcaactatcagcaactttggtggtgacaagaaattatctactatttcttatgctaacggtactaacggcggacatccgggtggtcatatgcttgtcaatgattcagttcgtcctcattggaaagaacttgtactattccctaatggtcaagcgttacttccccagcatcgaaataccctcattccaaacgctccacgcggtacacaagtattgagcggtgaaagtacttataaatttatgaattcaattggggttcataaatatgctaatgggacattatccgaatcagaaatggataagttatctgagcaatttgaaaaacatccagaggaagctgctaaaacattgatccttaaaatgactaactggaattcaagagttccacttgtagccgacctaggaccagcttctgctattgcatttgcaaaagctatttctaatgttttgaaagatcaaatggcgtctgaggctaatccgggtggtgctggcgtagcacgttggcgtccatatattattcgtgctttccatgcattaggctatgatgcagctgaatggaaagttaataagttgttgaaacaaattgagactgaatcaggtggtaacccaacgattccacagcaagtacatgataaaaactctggtggaaacgaatcactaggtcttttgcaatttgctttaagcacctggaatgctgatgcgttgcctggacataaaaatcgtgcgagcggatatgatcaaattctagcagctattaatgttcttgaacatggcggtgaaggaggttggggcaacgtcggtatgggtcatggatgggcaactggcggttttgccactaaacatggactatatgaagttgccgaagaaggactcccagaagccatcattccgctagatgttaataaacgtccgcgtgctttatctttgattgatcatactcttgataagatggaacaagatagcggcggaactggtggtttacgtagtcggcgagtgcaaagtcaatctaatgatgaaactactgcttatcttaaacaagctgttactttcttagcgcagattgttggcctaaataaacaacaaatcgatgctattttggctaatggtagcgataatataagtgcacggcgtaaacgagcacaattttatagtagttatggtaaagatcagaagttaaatgattatatgagctattaggaggtggattatctggtgcaaaatcctcaattatatctaaaaattggtgatggaaatgaatttaatattgctgataaggttcaaggcctaagatatctaggagataattcaactccagtaattaataattcatttcttgatattgctggagtagatggaagtcaatttcaatattcaacattttctcgataccagattgttgcaaatttctttttgagattttctgattggcaagacttcaaacttgctaaacatcaattttatcgaatcttcgggcaacgtaaattaattagaatgagaacggacgtggaatcttccattgtccgttttgtttaccccaatttacccgaaataaagcctagtcaagattatgctcatgatgcgttaattacaatgaactttgacaatccatcaggatatcgctattcgttatatcgtagcaactctttatatgacttttcttcgggctctgttcaatttggagaattggggttagaccatgctcctgtttatcactttactaccagtagttttcaagtttttaatccaagtgatattgcaattgatccgtatggacaaaagcatgacttacaagtcgtttgtcactttaatggaaattcgatgaaaattacaaattcaactaacggaagtgagtgggaatatcaaaaatcctcaaatggatcagaaacaataattcttaatggaattaacacaacacttaatggacaaccagcaagtgctaatactgattacggaaaccttattttagatactggctggaataatattgctgttaccggtgccaacagcatagatattactttcagttttccttttatttatctatgagacctggaattactcaaaaaataacagtaagaggacaaggacgcaccgaaattgaacctcttaattgtgttgatccagatagcttttacattacatgggaagttaattcaacttggagtttacaatttactgcttatcaagacggctccttggcctattcaatgttggatagtcaagcgtccgtcttttttgatggtcaagaatatatcatcaaacaagcagaaccagacgctaactctggacaaaactcgttagatgtggtagctactcatgtttattttgaagttggacgaattcgcaagtataagacttatgtggacccacaagataatgataagcaaacagatgtaagagttaacggtggaacacaagtagataatggcaatgacgatagcagtgatgatagtgattctaatgcacaaaaaacttcatctcaatcaaaaaatggcgatactaccaccacaacgactgttaccaagaccgatgaaaccaaagatgactctgacgaaaatcaaatttcttacaaaatcgatgatgttttgaaatattggctagacggcaacaatcttgggttttcatatcaagttattggtgattttccatcgtcacgtatagagcaacttagtgatggtagtgggtcggatatgctaagcaaaattactgatcactggcctaatgcgattatttacccagacaataaaaacattcgggtttacacccaagatcagttcaataaagattacggaaatcgacttgattatctttataacactaccgagtttaagtggacgtttgattctactagcttaacgaatgaagttatgtgtattggtggtaagtattcaattgaaaccgaagttgatactgatacagacagtgacggtgatcaaccagcggcaaacgttactaaaagtgcacaaggtgttattgatgacgcgcgttcttacttgggtgttccatacgtgtatggtggtgcaggtggtgcacgaggaggtaatccacgtaatggaatggattgttcttcttatatatcacaggtttatcaagattttggtattcatgtgcctgctcagactgtcgctatggaaccatattttcatgaagtgagttctccgcaaactggagatgttggtttttatggcgctcatggaagttcttaccatatttccttgtttttagatgcaaatactattatcttcgaaccacaacctggtgaagtttgtaaggaagaacctgctagttggttttatccaagctgggttgcccgcaatgatcaaatggcgaccattgttggtagcggtggctcggcaggagatagtagtaaccaaagtagcagtacttcatcatccattgagtattattactttgcgccatttatgtatcgtgatgaagaatcaattaaaaagtatggagagtttccagcagagccgattgaagacggtcgttttagtgataaaaatgccatgattgaatatgcaaaaacaaaaattcaacctaatccggcattatctgttgacgtaactacttatacaaatttcaagccaatagctggcgatatgattcacataatagtaagagaccaacaaatttccactaatgaagcagttgttggttttaactggtatccgtttagtgtaagtaatccaacctcagttacattgaactcaaatacacaaaacattttagattatcaaaatgcccgtaataagagtttgatgaaggctattgattcgattaaacaagcaccatcttatccggatcagtcaacaaatattctaactattacaagggaggaggcagaccgaattgagcaatacgtcgagcaacaaaacaagcaaaaccaaccaacaaacagttaaagttattgttggagaaattggacgagatacaaaaactggcatcttaggacgtggatactcatatgataatggagcaacctttcatgtaacagacacaatgtttgggcgattatatgataaagacgatggtgaaagaatgtggcctaatatggctcataaagtagcagatgaaatcaaatctgctacggccgacttaccaaacgtccgcaaacaagccgatgaggctgtgaaatttgctgaatccgccatcgctgcaagtaaggtcaatagtgatgcgattgttgcacagagttcagcggtggttgaagcaaagtccgcaatggatagtgctacggcggaaattcagcaattgaaagctaatgcagctagcgatgttgcacaaattagagcagacgttgcgcaagtccaaaatgaagttgatacggcaaaggctgctaactcggctagtgtagataagcttaaaagtgatattggtttagcgcaaaaggacctagataatgttcatgatagcttaactaaagcacagtccgctgttgagcagaatcaaaagctaattaatgacagtgttactaagattaatagtgatattgcccaaagtcgtcaagacattgtaactgctcaacaggctaatgacgatcttgctaaacaattagatacctattccaaagaagcccaagaacagggcaaaacgattaaaaccatccaagataatcaggatggtttttctattacaattgctgatgttaagggcgacgttacaaaggtatctgatacagtagatggcttgtcggctgggctaaaagatgcgcagggcaatattgcaagcgtaaaagcacaagctgatcaattgaacgctactttgactgatcatagtaaggatattgcacaactaaccgcaacagcaaaggaactcagctctacactggaagatgcaaacggacgactaagtaaggttgaacaaaccgcttctgaacagtcgactactttatctgatctgcaaggcaacttaacacaggttaaacagactgctgataatcttgttactacgttgaaagacgctcagggaaatattgaccagatcaagcaagatgccaaagggacactagaacaattatctaacgcccaaggtgatattgctgctctgcaaaaagatgttagtggcatcaaattgacaattgctgatcatgacaagaatatccataccttgcaagctgacagtaaaacgttgaaagatgacatggcagacgccaaggggaatatttccagtctgcaaaaaacatctacttcgttagttagtgagtttaaagatcacgatggtcgattaagcaaagttgagcaaaccgctactgaacataccagcgaattgactgatacaaaaggcaatattgataaggtcacgcaaaaggcagattctttgcaattattactcagtgacgctcaaaagaatattcaaaatattcagattgacgctaaaggcattcatgatacgttgactggtcaaggtaatcaattagctactcttaacattacggtaaataacttcgatagtaagtattccggtataactggcgacttaaaaactaagcaagcttctttgagtaccgagcagctgcaaactaaagatatgttgttgcgtaaagctgacaagtccgaagtagataatgtaaagggaactgttagcaaagtcagcgccgaacaaaaggtaatggctgatcagattagtcaaaaggtgtcatctgttgagtaccagacgttgaaggataaggttaatgggttaaggattggtggacgaaatttaataccaaatagcggaacagatattgttattgagtctaaaacaacggatgcgcggccggcatggtgtaatcgggtgatttatcgggatttaactcctggtgaaacatatactttttctgtttctgctacaaataccaatggggtcaaagaagcctcaatacggatttggaactcagctcttgataaagaagcacctggtagtttagtcttcccagcagatggtcgacgacactcaacaacatttacgattcctaaagatggagtgagctatagcgtttggttgtacgccggacatatgggaaatatagaaggaaaaaactttactacaacttaccatcatccgcaattagagttagggaatattgaatctgattattcccccaatcctgatgatgctatcgcttcaattaagaaaaactcaaccgccattgaccagaccaacaagcagattagcttaaaagccgaccagactgaagttgacaaggttaagggtacggcttcacagaacagctcacggattgatgtcatggctaacgagatcaagcagaaggttgatggcactaccgttaacaacatcttggatagtaagggctatgcaacgatgtcgtatgcccagacgctggttaagcagaccaaggatcagtggaatgtcactgctaccgatcttgacactaagatcaagagcaataacggtggcggtatcaacctgctaaaagctacagatttcagcagcactgatctaactaaacttaaagatgtgtgggggtcaaactttactcttcgtgatggaaaagcaatgcagttagaccagctgaaggggaacggtgacttagacgctacgcagtttcttcccgtagaaccagatactgactatacgctctcttttgaaacttattacaacacggtagcaagcggtggcagctacaataatatctatactttcattgtggaatacaaggatcaaaataatacgacacctcactatcttgaccatatgcgagtagttgctaataccgatgataggtcgaaaaacactcagacgattcatacacagaaagattgccattatgtacaagtgttcttcagagcttcagccaaaacgctattttcattctggcgtcctaagttggagcgtggttccgttgcaactccgtggtcaccggctccgtctgatttagcaaccgttactcaaatcagcaatcttcaagtaagcatcgacggtattcaaggcaacgttactaatctaaaaagcgatacgtcgagtaagcttacccagctttcaaacaccttccaaagtaagataggcgatgcccagattgcaattaatgacttgaaggacaagactttatggaagagcacggatagcgtcgatttgaacaatgtcgttacccagcagaagattttcgtcaaaggcggatcaaatctgccacccggtggttattggtggtatgtgcaggttgaacccggctatgacagccgaatcgtccagtacgccgtgtctgaccgtgacaatctgcattacagtcgtcagtacgacggaagtaaatggtccgcatggtcgcagggtgcaaccgagagtgagatcacccagcttcgtgacgacatcaacctgcgggtcaagagcggtgacttgttatctcaaattaatttgactgctggcaatacgttgattcagtcaaataagctataccttgatgcttcatcagtcgtattttccggtcgtgcttttattccgagtgccgctatttcagaacttgatgctgataagctgacgttctatggaaatggctcacgtgcgactattggcgccggtattgctcaatatgatcaggacaagataaagagcactatcaatcttcaataccaaggtggttttgagattcattcttctaaccagctggggtcaattctaacaatgcacgatgatactgttcggctggctgtaaagtcaaatggtatggcgaaccctaatagtccaacagatcagtattctggattttatgcttctactagttacagtttgatgaactcgtatcttaaagacgggacaacaagtggtatatcaatcggttctgcagatagtggagtgaataaagactatcgaattcatgtttatgatggttcaaatgcctctaacaatctatctaaaggtatttcaattagcactagcagccgatttgatgtttatgcgggtaactcacaattatttttaggacctgataaggcagaattacgtggaaacgattatgctacggttcacggtaatgatcacactttcattgaaggtggtaatcaacagatttatatgcataacggtgaagttaatatcggtaatcctaatgatactggtaatgcaactggggttcacctccgagtctttgggtgggcaagtttcaatggatacgttgaaggcatgggatggaccacaaaatcgactctttccagtaaaacaagaattgaaaagcttgatactaaggatgctctaaacaagatcatggaaactgatctagaaacttaccaatataaggcagaagtagccggaggcatgactaaacgccatgctggtccaattattgatgatgtgcatgatgttgcacagtacagtacacctgatgaatttattaatgagcgtaggacaggccgatctgatgctgatgttattggttacttgatgggcgcagtacaagaattaaagaaacaattagatgaaataaaaaaagaggtacaaattaatggataatttaactgcaaacgcaaatgatgttattgatgtattgcttgatcgttcaaagaatcaagaacgagatattgcaattttacaggttaatttagcaaatgagattaagaaaaataagagtctgcaatcacaactggacgaagcaaaagcaaaacttgctcaaaatgatcaagatttaaaaacagaacaagacccacaagctaataagtaagctgtgggcctttttaatacaaaaatttaggaggaattaatcatgaatgaattacaagtaaacaacttcacttacaactttgataatggacaaatcacttcagcacaaattggcttatatggaaatgaagttacatcaggcgaatatattaatgcctcaattcgggttaactctagcgatttaccagaaggaaagacatttatgcaagtagcaatgggtgacatggtaacaattgctcggcgaaagttagcaaaagatactgcaattaaggaaacgacaactactgataccgaacaaaagtaggtgaattagatggctaagttactatgcttaggtgattcaattatgtggggagtgacaggatacggtgatgctcatccaagagcagatccaactattcctgacaaaattggtgagttaattggtgctcaagtagataatcgagctgttagtgccacatcagttaatgatggcgataaatcgatggtttctttgctctcaacagttaatttagcagactatgactatattctattgggctatggagctaatgattggggacttaaccgtgaaagcttagatgctcttaaggctggattatcaatgttcagttccatgttctcagtttcaggcagtaaagcttatgtattagttgatctgatgattgaatcattcattaataatgcaacaaatcttgacagtcctaaccagttaggaattacacaaaaccaagttatggacgtattcaagagttgggcaactgagaacggctaccattattacgactggcgagaagatccaattgttacaccacagaattataaaacggtgttaggcgatggctgtttgcatccgaacttcgatactcaaatgcagatggctcaacgattagctgattatattaaatcaactgctaaagatataccaactgagccaagcaagcctgatgacaagccaactaatcctacaacccctactaatccagacaaacctaatcagccagacaacaaaccggatcaacccgttgttccagataagccagttataaaattaatcgatcaaattaaaattgatcgccttaatgatttatttggaattggcactaacgtgagtaacggggcaaacaacgttattggtaaggttaatgagctttatagcaatcttgaaacgattatgggaactgatccgcaaaaaactcaaatatcgttagtaatgccaggcaatgcattaacaagaagcttacgtaattatgtgttggcgtcttttcaacaattagaaagtgttgtcaatgatgtgattaaggtttgcaatgctaattggattgttgatccacaaacaggcgattctacaccgactctgaacttacagagagtagatcagttagcaactaacgatgtctacaagaaagcggtcaatgataattggggacaaattgaaactaccctcaataatttaattcagtatcttaatcaagtactaaaaggagagtgaaagaatggcaacaacaatcgatgaagcttatcgcaatggccgagtggttcttgatgtaaccatgtcttctgataaagtcacccgaattgatgaaatgaatggtcatcagggcgacaatgggcgagtagttaagtttgtgatggtcggacaacaaggtcatccgttcaatatggaaaatcgtagtcttgacttggtgggagttgactccgctggaaagactaagattagcggtaatactatgacgatggttaacccgtcattagggacgttagactttacaattccaggcgctttctatcagcgggtcggtgactatgatcgtgcctatttccgcattaaagacaacaacgatcaagttatttcgaccattaatgttatgtttagcgttattcaaggtgtgggctatctgacacaaggtgattcacaaatctatgacggcaacgttgataaccaactagctcagattgagcaaaaagttgcgtcttttacaagtcaacttcaaaatatgctgagcgggacaaccgatgcggcaaaaattgcaagacaatctctgaacgccgtcttatcatccattcaaactaatcaagttgctacattgggtggtaataatacatttacggggcagaatacctttcatgggactactcaaattgataaattaagtggcaatgccttacagcctgcttatgactatgctaacaatgcaatcaatgcggcaaaggctagtttggccgatgatgaatcaggtaagcaatacgatttcaaagcatggggagttaacggttgccgtgctcatgatgatgttaaatgtacgcttatcaaattcaataagtatgtcggttattgcaagcttgaaggaacgtttgattttccaccaatgaagccttacgaagggctggaagttattaatgttgataaagcggcaatgaatggtggtatctatgctttcccacgtttgacagcccagaatgaaaataatgttttaatgtttgattacaacactggtgatagtggtcaaatctggatgcaccaccaatcaaatagttacgatgcaactaagcctgatccagaatatattcaaatcggttggctctgctcctggcggtaaggaaggtggaaataatggcaaatcttttagcatttttgtgttcctacgttgtcggatatgcaattgccatcgctatctatgaactgggcaagaaactacgtagaaaatagaaaggagagataagatgcgagatctaaccattgatgaaaagtggggcgactggaagttcggtgacactgatgcagtaatgactttcactgcattggacgatgaccaagtgcccgactttaccaatcggacattaacgttcaagattgccagtaccttaaacaatgacttagaacaccctaaggacttcgccgctacggctaccgggtatattcaagataagaatgtcattcttaaaacagaagacgttaaacaattaacccctggcaactatattgttgaattgtgggcgatgagcaacgacacgcagaaagatgctgtctatccctcaaaaggatttgctcaatttacgattgaagaaaactcaatgaaggtatcagatgtaactaacattccatcaatgacaattaatgccttttggaatgcggttatgcaaaaagtgggaactttgactaaaggtgctaagggtgatcctggaaagaccccgaagattgtgattggctcggtaaccaagttgtcaccagatgctcaaccatcagcaaccttagtcccattacaaagcgatccaaatacctatactctgaacttacaattgccacaaggaatgcaaggagaacaaggtattcaaggacttccgggaactcctggtggtccaggccttaacgggaatgacggtttaacgccttcaattgatccaaagacgaagcactggatgattggtaatactgataccggagttattgcagaaggacaagcagggaaggacgctgatgcatctaaatttgtcactgttgaacaatttaatgctcttcgacaaactgccagcgataactcaactgaattaaaggctttacaggattctgctaacaagaattcagaagatcttagcaacttgaaagatcaagttaacaccttgcaaaattcaacgaatttagatgagattaaatcacaaattactgctttacaaactgcggttaaagaacttcaagaggctggcaaacctacgactcctgctaagagcaatacaccagcaagtaataagccagcaacaagcgagcctactaagtcggatactccaacctctgctgacccagctactagcgcaagttcagcaagtacctctgatacgtcggcaagtagcgccgctcaataatggaggtgagtaaatgcactgggtagcaattcactatattttcggctactcgctagaggattgggtagccattctaaccatcattgggataatcattaccggatttaaatggctaagcaaacgttcaaagaaagccattgataatattgagaaaaatattcttggcccaatttatgatgagttaagtaaactcaacaagaatatggaagtctctaatcgtcaatatgaaagagccaatgaacgcctgcaagcaggagacaagaagttcattcatcacgacgagcaattgaaagatcacgagcgtcgaattacaaacttggaaagaggtagtcataaatgaatttaaaacaaatgcttaaaaagaagttttttaatccagacggtacgatcaataaaacggttgtagcgtcttttattacgctgttaattgtgctcattcaacaagtcatgatggcttttggctttacgtatggccactgggaccaagtagcggcgatcattaacacgatcctaaccattctggggctttgtggttttgttgaaggcaacggggaagtaaccaccagtactgttgaaattggagttgatggtgtaaagacaactatttctaacggttccattaaattgaatacagacaagactatctttagtggcaagagttttattcctaatcaatctaccaaggagggtaaaaaataatgaaaaataaatcacttaagaaagctaagaacttagcactggcaaccattgctagtgcttttttagtgggtgcaactactaccgtagaggctaatagtgctaatgacgctggctcaacggtaacttggaaaaatgctgatggtcatcaattgaaagataattggttgtataagtacggtaatctttattacttcaataaagacggttaccgattaactaataaagcacaaaagattgatggtaacacttattactttggtaaaggtggagaaatggtccgcaatggtttcgatacccggaacggagcgacttactactacgatgccaatggtaatcaagtaagcaactatttctataacaactggggtaatacctactatttcggtaaagatggcaagcgttataccaatcagttttatactaactggggacgaacttactactttggttctgacggtgctcgctggaataatcgcttctataacaattggggtcatacttattattttggcgctgatggagcgcgatatactaaccagttctaccaaaactggggtaacacctattacttcggaagcgatggtgccttagtaactaatcaagatattacggttaacggcgtgaagtatcacgctgatagtcaaggtgttttgacttctgaaaatactaatgcctttacaccatcacaaatcaatcatacctacgacctcgccagctgggagggaagtagtcaatcagctatcaacgactacatcatcatgcacgatgtcggcgctgaatcaggtgccgctgccaatgctaactatcttcacaacaactgggaatcagcttatacccaatttgttgtcggcgatggtggtcaagtctttgaagtcggtgaaccgggttatgtttcttggggtgctttaaatgctaatccatacagtccgtgtcagattgaattagggcgaacatacaaccgtagccaattcattaaggattacactgcttacatcaatgttgctcgttactacgctaagcaatatggtattccgctaactcttgatgctggtggtgcaggaactcccggtgttaagacccataactgggtaaccgaaaatattggtggctcacatgttgatccatacggatacttagcaagttggggtattagctataaccaatttgctaatgacattgctaatggcgtcaatcagcaacaactcaattcagttgtttactcacaacgtcaataataatttagccctagagattgttaccattttttttgtaatgatccctagggcttattttgttataattgttttttataatgagtgcttaacagggcgctttttgtttaattaagtaaaatataacgcataataggagaaaaaaggatggagacgggaaatctagcggattggtttagcgcaataggcacagtcttttcagcgattgtagcattgtatcttggacttcgtaaaaaacaaattaacgtatcatatgttattaactataatattgttttaaaaaagtggacaataacggtatgcaacgcaagtctaactcctctaaattatgatggttggattgttgatgcgcagggtatgaaacataggactggttgtggagtagaagctagaaaaccatataacggtatatgcccaggaggagaaatagaacttctaaaaaatgctccgtcaatgcatttgaatttatttttaaatgaaagaataagcttaagtaaagttaaattacagtttgttaagaaaaacaaaacagaatatttatatcgtgtttattttagtttaatgggccggaaaattctatatagaaaaattgatgaacaaaaaataaatcttgataatttatcaaaatttattaattaatttcttttaaaagggttttggtatatagtttatttttagatactatataatagtagaaactaacatctaaaataaagttcgattggatgttctgagaaccccaaaattttttgctatatatagcaaaaatatagcaaaaaatatgaaaagtcatggaagactgcggaataacatggaaaaagatccaagctataaacgttgacatgacagtaaaagcctattagaataggacttgtaaaaatataaaacgtttgtcttcaaggcgtggtgaaattcccgaccggcggtgacagcccgcaacccattgttaatggttgatctggtgtaattccagagccgacagtacagtctggtataaagaagatttctgtattaaataatctttaaatagtttatttgcgttgctgacaaacaaatggtaagtcggcaacgcttttttaatacaggatgccaaatggagacaatctcagatggaggttgttattaatgacagtaacgcatcaacgtattcaacgattggtaggcatagcctgtttaggtgccttagcatttattttaatgttttttgagtttccggttttgccgatggcgccctatcttaaactggacttttctgatgtccctgttttgctagggggctatatctatgggccagttggcggaattattatcgctgcaattaaatgcttaattcacggaatgattcatggcttttcgccagctgaattaatcggggttaccagcgactttatttcatccctcgctcttctgcttccgttctgctgggtatggcgtcatcataactggagtaataaaagacaagctattatcggaattgctttaggaaccgtaacgttgactgttttaatgtctctgcttaatttgtggatccttacccctttatatatggcagtttggaactggaagtcaactttgcccgtatctcaattagtagcgatcggtgtgttgccttttaaccttattaagggtttggttgttacaattgtatatgtaattatcgcgggtcggttgagtccatggctagaccagcatagaatgatttaaaaagatagattaagaggctgagatttttcttggccttttatttttatggtagaatttttaaataaattacgtatataaatatataggggggtgaaatccgtgaataaattattgcgcttttttagctatcaccagccacggcgaattcgtgtaattgaaaacactctgcgaagtcggcgaacagtcgcaactctcttttgggctcgacagtatggaatcttagagtggttaggggcagatcgaacactgaatcgacaagaatatgatcagcttattaatcaacttgttgctgataaactattagcgattgatgatcaatcccaagcaattcttacagaagagggcgcgaaagttttaaaaaacgaagaagaaactttctacatcccatcgttttacgactggtactggttaaccaatacgcaacgaataatccaacgactttttttagctattcaagtcgtatcagaattctcttatcatcaaagaaagtatgttccattggcgatttcatatggtgaaatggttgcggtgaagcagtggtttcgacaaaattatcatcacgatctggttaaaaatctctatactgatctccatcggtttggcagcgctttggaaagtgaagatccacgaatgacaacggacctttttaatatcatgattggttatcagcgatcaggatggacaattaatcaagcagctcaagaattgaaaataaaaatcgatgatatccagtacttacgtcatgacgagatgttagcggttagcgcttatgctcgtaattttcctggtccactgcaacaattgctccttccgctgatcaatgagagtccactaaaccggagtgcccaagtaacgtttgacttatatacccagggagagccaattgaactgattgctcaagagcgacggttgaaagaaaatacaattagggagcatctcttggaagcggcaatccttattcctgacaagctagattgggatatccttttgccagagagtaagcgtgacgaacttagtcgattctataagggcgaaccgaccgcatggaaatttgacgagcaaattgccagtttttatgaataccgcctatatcaaatatttcaaggaataacaaatgaaaaataagcaagaaattctagatgttttacaaaatcattttggctttgaggattttcgtccaggccaagaagagacaattaacgccttactggaagggaaagacactttatcgattcttcccactggtgccgggaaatcccttttatatcaattgccagcttatttattgtcaggaacgatcctcattgtttcaccgttgatttcactaatgcaggatcaggttgaccgtcttcatcggcagggagaaaaacgagtcattatgttaagcggccagcttgtcggaaaagagcgagcaagcgtcctccacaatttgaaatcatttaaatttatatttacttctccggaaatgcttgataaccagcaagttttaaccgcgcttaagaaaaataagattgcgttaatggttattgatgaggcccattgtatctcacagtggggccctgattttcgtcctgaatatttattactaaaggaagtgcggcagcaattaggatcgccgacaacattgctgttaacggcaactgctactcctcgtattcgacaggacattttgaaaaaaatggggatgacgactgcctaccaggtaattaaatctgttgaccgtcctaacatttttttagctgttaagtccatcgctactcaaaaggaaaaggatggtgaacttctgaaactagttcaaaaattcactggtcccgggattatttactttgcaagtcgtaagctggcttctcagatggcagaatggcttgaaaaccaaactgatttaaatgtggcggcttatcatgctggcgttgctccaattgaacgatttcgaattcaaaatcaatttatgaataatgaattacaggtaatttgtgcaacgagtgcgtttgggatgggaattgacaaaaatgatattcgttacgttattcattatcatttgccaagtaatttagagaattatttacaggaaatcggtcgagctgggcgtgatggtaagcagagtttggcagttcttctatatgcaaatggcgatgaaatgattcaacgacaattaacaagcgttgatcttccgccagttacaattttagagcagattaagaatggcaagttgtcagcaagtgttttgggggagcaagcgtctttatttgcgttttatcttgaacattcttttacgccgcagcaaataattacgatgtttgagcggcgcaaaattcaaacagaaaaagaattgcaagaaatggttgcttatatcaaagaggacggttgtaaaagagaatatcttttaacatattttggtgagcaatttgccggttcgaatgaattttgttgtgattatgagctttcagattgggcaactaaactgattttgccggtcagtcagccactttctgaaaacaataaagtaggatgggaagaccgcttaaagggcctgttaaatattactgaaaattaaagtttcgtgttgttgctagacaatcatcaaaagtttgcgatacaatcagaatgttaattctcaaaataaggaggcatgattactttgagtgaggaacggaaagagagccgacgagctaatgatgaattatgggataaaaagtttacagataacgaagaccttgatagtgatggccatttatcacgaacagaacaccgtaagcaacgatcacataattcaatgattactacgatcttaatcgtattaattatcgttctcgccgctacaccacttatttattggattaataataaacagtcctttaatcatccggtgagaactgaacaagtagttgctagttctgaaaatagtaaaaaaaaagaatctcacagttcgagtacctctagtgagcattcaaagaaggaatctagtgtaagcagtagtgaatcctcttcttcaagtattgaggaatcaagttcgacacaaaccagccaaagttatagtgctccgcaaagcagtagtagttattatcgatatagtagtagttatcgttatggtaatgggtatcaaaaccggactactcctaatcgctacagtagttatcagcagcgttataacaataaccaaacctataatcgctacaataataatacagaaaatacaaaccgttatcgttaaaaatagagtattagcagcaattttttgatagagtagtgtattggattgaaaatagaggagtgaataactaataatgtgtaagggattgcaagtagcaattgatggtccggcctcagcaggaaagagtacggtcgctaaattagtagcaaaaaagtttaattatgtctattgtgataccggcgcaatgtaccgagctgttacattagcagcattaaaccagggcattgatccaaaagatgataaaaaggttgctgaaattgctcggcaaataaaaatagattttgaacctggtgaaactgaacaaagagttttcttggatggcaaagaggtgactcatgatattcggttgccgaaagtagcagcaaatgtatctgctgtggcggcagttccagctgttcgcgaagagatgactaagcaacagcggcaaattgctgaaaatggtggaattgtaatggatggacgggatattggtacaactgttttaccacaagcacccgtaaagatattcatggtagcgagtgcctatgaacgggcgcgacggcgatacgctgaaaaccaagcaaaagggattaatacaacatcgcttgaagaattacaaaaagcaattgaattaagggataaaaaagactcaacgcgaaaagtttcacctcttacacaagcacctgatgcaatcaaattggatacaacaaatatgacaattgatgaagttgtgagtgaaatcagtaaaataataaaaaaaacacaagatgaattagcctaaatactggaaatgtgaaacaaattttagtaaaatatcttttagagttgattgttgcaaggaggattttttttaatggctgaaaacaacgaaaataaaaacgatatgttagaagcgcttgatagcattgaacaagttaaggtgggcgatgttgtcaagggtgaagttttggcaatcgatgacgatcgtcaagctatcgttggtattaaagatgcaggggttgaaggtgtcgtccctgctaaggaattatcaaccaagccagttgaagacatcaatgatgctgtaaaagtaggtgacgaattagacttagttgtcatttctaagatcggtaacgataaggaaaatggtagctaccttctttctcaccgtcgtcttgaagcccgtaaggtatgggatgacattcaaaagaaatttgatgaaggtgaacacattaccgccaaggtcactcaagctgttaagggtggattagtcgttgatgctggagttcgtggcttcgtccctgcttcaatgattactgatcactatgttgaagaccttaatcaatttaagggtcaagaacttgaattcaagattgttgaaatcgaaccaagcgaaaaccgtttgattctttcacacaaggaaatcattcaagctcaacacgaaaaggctgctgaaaaggtatttgctgaattacaaccaggcgatgttgttgaaggtaaagttgcacggatgactaacttcggtgcatttattgaccttggcggcgttgatggattggttcacgtttctgaaatttcatacgatcacgttgacaagccttctgatgtattgactgctggtcaagatgttaaggttaaggtattaagcgttgaccctgaacgtgaacggatttcattatccattaagcaaactttaccaggaccatgggatgatattgaagaaaaggctccagtagacagcgtattaactggtactgttaagcgtttgactagctttggtgctttcgttgaagtattccctggtgttgaaggtttagttcacatttcacaaatctcacacaagcacattgctacacctgcagatgttcttaagccaggtcaagaagttcaagttaaggtaatcaatgttgatcctgaacaccaacgtcttggtttatcaatgaaggctcttgaagaacgtccaaaggaagacgaaaacaacaataacaacggtgaaaactaccgtggtcgtcgtcgttcacgtcgtaacaataacaaccggagcttcatgaacaacgctccagaagaagaaagtggcttctcaatgggtgacttaattggtgacaagcttaaggacctacggaactagtttcttaaattaattatcttttaaggggaggctgggaattaactcagtctctttactttttttaaaggtatttatacagtagcgcagtagctggctggattccgaacgttgataaatcaacgtccggaatgcctagccatcctcgcgagggtgggaaaacgaagtcgcaagcgacttctttcccactccctctttaatcatttaaaataaaatgaaagaaggtggaaagattggcaaatccaatcgtagcagttgttggtcgtccaaacgttggaaaatcaacattattcaatcgtattgcgggagaacggatttcaattgttgaagatactcctggagttactcgagatcgtatttatgctcatgctgaatggttagggaaacattttagcatgattgatactggcgggatcgaaatatcagatcaaccattattgacacagattcgccaacaagcagaagttgctattgatgaagcggatgtaataatcttcgttgccgatgtagaaaatggtgtaactgatgctgatgaacaagtagcacgaattttatatcgctccaataaaccagtggtcttagctgttaataaagtcgataatccagaacggcggagtgatatttatgattactattcccttggtctgggtgaaccgtatgcagtttcaagtgttcacggtattggaatgggtgatcttttggatgctgttattaaagagtttcctgataacgcagctaatgatgaagatgactccattcactttagctttatcgggcgtcctaatgtggggaaatcatcactggttaatgcaattctaggtgagaaccgggtaattgtatctaacgttgccggaactacccgtgatgccattaatactcaatttgaaacagcagatggacaaaaattcacaatggttgatactgctggaatccgcaaaaaaggaaaaatttatgagaacactgagcgttattcattgatgcggtccatgcgagcaattgatgatagtgatgttgtacttgttgtcctaaatgcagaagaaggtattcgtgaattagataagcacattgctggatatgctcatgaagcaggatgtggggttattatcgtcgttaataagtgggatacattaaaagaaaaagaccaccgaacgatgacagattttactaatctgattcggcaagaattccagtacctcagttatgcaccaattattttcgtttcggcgaagacaaagcaacggttaaatcaattaccgggattgatcgaggaagtatatcaacatcaccgtcaacggatccaatcggcagtcttaaatgatgttttaatggatgcaattgttgccaatccgactccaacacaaaatggtcggcgtttgcgagtatactatgggacacaggttgcaaccgaaccaccaacatttgttatctttgttaatgatccagagttaatgcacttctcctatgagcgttatttggaaaatcaaattcggaaggcatttgacttttctggtacaccgatccatttaatcaagcgtcaacggcagtaaaagttaaagaattcattgtaaaatgaaaaaacattaaaaatgcggctagaagttgagaaaaccgcttgtcagcaggctttcactatgctaatcttaacaatgaaatgatacgaacttctcgtagttatttcgttaattttggaccactcaaaattaacattcacagacgtgagtttaacactctcgttatttgtgggaggtgaaacaacatggcaaacaaagcagaattagtaagcaatgttgctactgcaactggcttaaccaagaaggatgctactgcagctgtagatgctgttttcagttcaattcaagcatctttagctaagggtgaaaaggttcaattgatcggcttcggtaacttcgaagtacgtcaacgtgctgcacgtaagggccgcaacccacaaactggagaagaaatcaacattcctgcaagcaaggtaccagcattcaagcctggtaaagctttaaaggacgctgttaagtaattaacagttaaatgttaaaaagagactaggaaagaatttactcttcccagtctcttttctttttaaagacttgttcaatgcttaaaatcatcgattgtgatatatttaaaagtgatagtaaaaggagggcataatatgacctactcagaacaaatgcttgatcaattagaagcaggaaaattaaaagaagcccaaaactcatttaaactcgcactaattaatgatgatgatgatatgttatttagccttgcggaggaattgtacgcattgggctttcttcaacaggcacgaacgatttacttaaaattattagattgttatccagatgaagatgaattaaagactaatttagcgacgattgcaattgatgaaggacataatgacgaagctttatcatacttagcccagattaaaccagactcgccagcttatgttcaatcattactggttgccgcggacttatatcaaaccgaagaagaatttgaagtgacggaggaaaagttaaaagaagcttacgcgttggctcccgatgaaccagctgttgaatttgcgcttggtgaattttactttatggttggccaatattctgaagcaatccaatattacttccaactaattaaaaatgggtatactgactttgcaaaagttgatatcgctggacgtctagggatttgttacgctcagagcggtcagtttaagaaggctttagggtacttcaatcaggttaaaccggaataccagactagtgatattcgtttccaaaaggggttgacccgacttcaattaggagatactgaaaaggcaataaaaaccttagaggatcttatcaatgatgataaccaatatgcgtctgcttatcctgaactagcaaaggcatatgaaaaggaaaataagtatcagcaggcattacgagttatccaagaagggctcagtgttgatcaatacaatgaatacctttattcattagcagctgaaattaccagctaccttggtgaccaaaagttaatgaagaaatacttggtaaaagcgcatgaacttgctccagagaatatgacgattactttacaatatagtaatttcttgcttcaccaacacgatgatgaggcaaacattaagctcctgagtccattggtaaaagaagatgaaacagatccacaattatattggaacctagcgcggtcatatcaacgaactgatcagcttgaattagccggaaaatattatgaagctgctttgccggcatacagtgaaaatccaacattcttaaaagaattaattaattactaccgcgaaactggtgaaactgataagttaatggatgaattggaacactatctctggttagtcccaacagacactgaaatgcaagatctttatgaccaatatgaagattacaaataatttttaatttaaatgagacaggaaacgttaacgcttttagccgttctttacgcttcctgtctctttttagtagtaacttaatttgttataatcaactttgattatcaaaatgaggacatgattaaatgaaaataaaaaaattaccagctatatttgaaccagcacgccctgttttacaaaaaatagaggaggccggctacgaagcatattttgttggcggttgtgtccgtgacactattttgcatgatgagattcatgatatagatatagcgacgagtgcttaccctagtgaaataaaggcgatttttaaccatactgtcgataccggaattgaacatggtacagttatgattctcgaccatggaacgggatatgaaacaactacttttagaaccgagtcaggttaccaagactaccgccgtcctgataaagtgacttttgttcgttcattaagtgaagatctccagcgtcgagacttcacaattaatgccctcgccttacgggaagatggggaagttattgatctatttgacggactagaagatttgcaaaaacatcttattaaagcagttggcaaccctaatgaacgttttcatgaagatgctttacggatgatgcgggccgtgcgttttgcaagtaagcttgattttgtcattgatactgcaacattaaaagggattaaagaaaatgcaccattattagaaaaaattgcagttgaacgaatccgggttgaactagaaaaactattgctgggtcaaaatccagtagcgggtttaaaagattttattgcgactggattgtaccaatattgtccagggttggaaaatgcgcaagctgctttatcggctttattaatccttaaccaatggcatttggaaaatgaggcccaattgtggtcagttttgagcttacagctccagcttgatcaaaaagaaattggtaaattcttaaagaagtggaagacagcaaatgatttaattgcgcaggtcaaaaaagtagttccagcagtccaagcaattcgtcaacgtacgcttacgccaacactaatgtttaataccggtgaaacagccctccatgatgctaaccaagtagctaagttatatggatgggcaattaatgatgaggaattacaaaaagcttatcaaaaattaccaattaaaaacgctaaagaattagcaattgatggtcgaatattaattactaaagcgggggtaaaaccgggaccattgatggggaagattcttcagcaattaacgttggcagtagtaaatggcgaaatagctaacgatgcaacaaccttattagaaaaagtagaagagataacgaaagagggataatatgcaaacaatgcgtgcagagggcctaaccagcacatacggtgaaaagaccttatttgatgatatttcgtttattatcaatgaaaatgatcgaattggactgattggtgttaatggaagcgggaaaacaagtcttcttaacgtaattagtggggaagtaaacccagaaggtggcggtcagatcactaaacccaatgattatacgatcggttatttaaagcagcaaccagagcttgatgaaaataaaacaatcatggaagctgtttttgaaggtaaacaaccagtgtttgaaacgattcgccaatatgagctggcgcttgaacgctttacgaagcacccggaagatccacaagcaatcgaccgttacacaaaaatgcaggcacgaatggatcaagaagatgcatgggaagcagatagtcgggtgaagacgattctgacccagttaaagataaaagatgtaagtcaaaagattgctcaactttctggaggacaaaagaaacgggttgggctagcacaagtcttaattcaacagccagatctcttattactggatgaaccgactaaccacttagacctcgattcggtagtttggctccaagattttcttcgtagttataagggtgccgtccttgttgttacccacgatcggtacttccttgatcaaattacaaatcatatctgggaactatcttttggtaaactttatcactacgagggaaattatcaggactttgtagcaaaaaaggcggaacgagtagaattagctaaagatactgagaaaaagaatcaacagctgtataaaaaagaattagcctggatgcggacaggtgcaaaagcccgttccacaaaacaaaaggggcgaatcaatcggttccacgaattagaaggaaaaataggtaatcttaaaaccgatgaagatattgctattaatcttggatcacaacgtctagggaaagatgttattcaatttaaggatgctaacttaaaatttgataatcatcaaatcctccatgacttcaattggcttgttcaggcaggtgatcgaattggaattactggtgaaaacggggcaggtaagacgagtttattaaacgtaattgcccaacgtgtccctctagatagtggtgtccttaagattggtgaaaccgttaagttaggatattatacccagcaaacagaaggaattgacaatgataagcggatgattagtttcttgtctgaaattgcagataatgttactgataaagatggtaataagcttagcgttacccaattattagaacgtttcctattccctcgctttatgcatggtactttgatccgaaagctttctgggggtgaaaagcgacgattatacctcttaaaaatcttaatgcagcagcctaacgtcttattactagatgaaccaactaacgaccttgatattggaacactgacagttcttgaagattacctagataattttgcgggaactgttattacggtttctcatgatcgttatttcttagataaagtggccgacaatttgctagtcttcaatggaaatggtgatattgagcgttatacgggacgctttactgattatttaactgctaaaaaagaagaagcagataaggataaagagcttaaaaatgatcaaaaagcccttgctaaaaagcaggcaagtaagcaagaaccagccaaaaaagaaaaaacaaaacttacttatgctgaacaactcgagtgggatcatattgatgaagaattagacgcccttgatcaacagcatcagcaattagaaaatgaaatggctgaagcagcaagcgattatacgaaaattgctaagttacagaagcagctaaatgaaatacaagaaaaaattgatgaaaagacagctcgttgggagtatttaagcacatacgttgacgagtaaaggaagggaacataaggatggcaacaaatataaatgaagagcaatacttagacttaattcgttatgttttgacgaatggacatcaaaagggtgatcggacaggaactggtactaagtctgttttcggatatcagatgcggtttgacttaagcaaaggttttcctattttaactaccaagaaagtcccatttggcttgattaagagtgaattactatggtttttacgaggtgacactaacattcgcttcttacttcaacacaagaatcatatttgggatgaatgggcatttaagaagtgggtggaaagtgctgaatatcaaggctcagatatgacagactttggtcaccgctggcttaaagatccagagtttaagcaggtctatctccaagaaaagaaggcattttgtcagcgaattcttgaagatgatgattttgcccaaaagtatggcgatttagggcttgtttatggaagtcagtggcgaaaatggaagacgagtcaaggcgacacaattgatcaaattgctaatgttatccagcagattaaaactactccagattcacgacggatgattgtttcagcttggaatccagaagatgttccttccatggctctccctccatgtcacacaatgttccaattttatgttaatgatggaaagcttagttgtcagctctatcaacggagcgccgatatctttttaggagttccattcaatatcgctagttatgcattattgacgcatatgattgctcatcaatgtggtctagaacctggcgagtttgttcatacattaggggatgctcacatttatctgaaccaccttgatcaagttaaagaacagctgacaagaacacctcatgaagctcctaaattgattttacctgctgaaccaaaaccaatcgatcaatatgaaatgactgatattaaattagaaggctatacttatgagccggcaatcaaggctcccgtagcagtttaaaaggagtggttcaaaatgagtgaactgaatttaatctgggcggaagatttgaatggttggattggcaaagataatacaattccgtggcatgtttctgctgatatgaagcattttaagacaaaaactactggtcacccaattataatggggcgaaaaacttttgcttctcttggcaataaaccgttgcctaagcgagaaaatattgtgcttaccagtcagaacatagatgctgaaggagtgaaagtcgttcattctttagctgcccttaaagaatatcttaaagcaaatccaaacgaatattttgtaatcggtggggcaacgatctatcagcaattactcccaatggcgacaaagctaacacgaacggtgataaataagcaaattgttggagatacaaaaatgccaacgatcgattatgaccgttggcacttagtaaaccacaataattatgaaaaagatgaccagctaatttgtcgttttgaagaatgggaactaaacgtataaaagaattgaaaagtacattaatatcgtgccgatgaggacaaaaatatgccaaatcaaatgggtatatgccgttggccggctgtaaaagagggcgccaagagtaaaggaaagtcctcctagtaaaagcaatccgaagccaactggaccaagcgcataccagagaggcatgaaggcaactagacatagccagcccattagaatgtaaataatggttgaatatttacttttatgttttaaccaaatacatttatacacgattccaataacagataagccccaaatcacgccgaaaattgtccagcctaaccagccgcggatactaactaaacaatagggggtataagtcgcggcaataagcacaaagatcattgaatggtcgagaatttgaaagacccgtttagctcgtgtaaagatcaaggcatgaaataaggttgacgaaaggtaaaaaagaattaaagcacttccgtaaatagtaaaggtaacaattcgcatgggactaccagtatgaacagctctgataattaacaagatcaagccagcaatcgatagtcctgctccaatcccatgagtaaccgcattacctatttctatcagcaaagtacgccgatctcttgtctctttttgtctatccatcaaaaaacctctttccaaagaccaatgaatttttaaaatatttttgttatactaaataaatagtaattgatcctacaaaattagataaaattgagtataatagtacttgaaataaattatctagttctcaatactagataattatagcacaaattgttcaggaagagtggtaagtttcatggcaaagataaaaattgtttgtgactcatcagcaggattaactgatgaagaaattaaaaaatatgacattacaattataccattaagtgtaatgattgatgggacggtatacgttgagcgtgaaacaattacaaacgaacagttccctgaaatgatgaagaatgctaagtcactaccaaagacttctcagccaccaattgggaagtttgtagatgcctttgataagctaggtgaagatggtagcgaagtattatgcgttacaatgatggaatcaattagtgggaccgtccatgcggctgaacaagcggctggaatgacaaagacaaaagttacagtctacgattcccagtcaaccgaccaagtaatgggcttcgaaataattgaagcagcccaagtgattgaagctggtggtagcgttgaagatgcaattgctaagatgaaagaagtacttagtaaatctgaactttacttggcaattgataaccttgataatttagttgctggtggccgaattagtaaatttgctggtgctatttctaacctattaaacattaaggttatgctccatgtgtatgacggtcagattcatattgaatcaaaaggccgtggcattaaatcaatgcataaggaatgggataagattttagatgaaatggcacggggaccaaaagttaagcgaattggaatttctcatgtcgatgctggcaaagaagtagaacgcttattagcaaaaataaaagaattttatccagaaatcgaggttactgttcgagagacagtgccaattattgcaactcacactggaatgggtgcttgttgtttgctatactatacagaataatctttgataaaaataagtggaggctgagaaaaatggaaatttttcccagcctctatcttcttaaaattttaaaataaaggactatagaatagatgaaaaagtggactaaatggctattattatcgcttttggctattatgattattggtgggggatggtatactgttaaccactttacaaatttaactagtaatagttcaaaagttgttacaccaaagtatgttgaaaagaaaaatgtaaagctggttgcactaggcgattcccttactcacggtcaaggggatgagagtaataatggtggatacgttggggtaattaaggaaaaaatcgaacaccgttaccaccaaactaaggtgacaacagtcaattacggggtaacaggggaccgatccgaccagattcttgaccgcttaaatcagcaatctcaattacgtagtgacttacagagcgcggatgtgattacgatgactgttggtgggaacgacttgatgcagatcttggaaaaaaacgtaatgggctctgaacggcaagttaccagtagtgttgaaagtggcgaaaagacttatcaaaaaaaattaattaagctatttgatgcagttcgaaaggaaaatcctaaggctcctatttttgtgatgagtatttataatcccttctatatctatttcccagatgtaacaattattaacaagtcaattaatcaatggaaccaaactacgcaagatacaatgaataattataagtcaatgtattttgtgaacattaataagttgatgtcatacggtcaatatcagactaagagtcagcaacaacagctggtcaaggaagaagaaaaggctaatcaagggcaagtcagtcaaaagcgggtcattgaaattatgaatcataaggataagaaccttaataaatatatttcaacagaagataatttccatcctaatcatacgggatacgtcaaaattgctgaccaattatttaaggtaatgcaaaaacatgatagctgggaattcacacggaggtaaaaatgaaaaattctgaagaaaaaaagactaattggtggaaatggggcttttttttcttagtagccttgattgtaattagctgtggggttgtgttaaacaaggtgactgcaccgactcctgctactacaactagcaaagcagtaaagccaagcgattcatcagtaacggttgaattgaataaaaaacaggtgaatgctttagctgctaattacctgaatcagtttttaaaagggcaaaagatccgttatgattttattgttggcgatcagtatgctaccttgacaggaaatactaagtttctaggggctaaggtgcgatttgccattaactttattcctgaacgactaagtaacggaaatgtcttgttgcgggctaagggactttcagttggacggttaaatatcccgatcaaatttgtgatgggttacattgcaaagaattataatattcctaaatgggtaacaattaacccacaaaagaagacagttttattagaccttaaccgttatagcaagcaccgttctcttaagtactcggctcaggaaattaacatgcaagaaggacggtttaagtttttaatcacggtcccaacaagtaatgaataaatattggaggaaatcaaaatgagaatgagtttttatcagtttttaatgactcaacgaaatccgaatagtgcagatgaagttcaacaatttgcaaacaacgcttttttggatactacttttcctaagcattcagaggattttgatgaaatttcgcattatttggaagaaaatgctgactatttgccatcaatgacaatttttgatgaagcttggcaacggtatattgatgcaatgaattagaaaagaagggagaaagtcaaatggcaacaattcaatggttcccaggacacatggcaaaagcattacgccaaattcgtgaacaaatgccactagtagatattttgtttgagctagtagatgctcgtgtcccctattcgtcacaaaatccagaagtggcactagctgcaggagaaaagcccaaacttttaattatgacaaaaacggacctagcagaccagaaacgattaaatgaatggattaaatactttgagcaacataatcaaccagttcttgctctcgattcacgccaaaataacgtggcaaaagttgtaacggctaaaagtaaagagatattaaaagatagattggcagaagaaaaagccaagggaatgaaaaagaggccaattcgggcaatgtgtgttggtgttcccaatgtagggaaatcaactcttttaaatcacctggtaaaaaagaacgttgcggctactggaaaccgtcccggagtcactactggacagcaatggttgcggtcatcagcagaattggaattacttgatactcctggtgtcctttggcataaatttgctactcctaagcaggggataatgcttgctttaacaggagcaattaaagatagcttatatgcaaaggatgatgtagcgttgtttgcccttgattacttgcggcaacatcagccagagatgttaaagcaacgttaccacttaactgatgcagatctggacgaatcggttgccaatccagatttactattaacgattactgctaaaatgggctttcgtgatgattatgaccgggctagtgaacgcttgatttttgacttgcgaaagggaaaattaggaccaatcactttggaagtacctgctgacctaaatgaggatggactaaatgaataaggaaaccattagtcaaattaaggcccgtttacaaactatcacagatacaactgatccttacttgcaaactattcgtgatgattcgcgaaaaggtgttcaagcagcaattcagcaatttgaacggcggcttgcacggcagaaggaagctgaagaggcgttcaataaccggtttaaatatgaaaagtactactgggaaaagggatatcagtatgttgcaggaatggatgaagtaggaagaggaccattggctgggccggtggttacttgtgtagtaattttaaatgcagattttgacctgataggggtaacagattccaaacagttaactaggcatgaacgagaaaatttgtatttacggattgttgatgaggcggttgaagttagcattgcggtaaatgatgcgccagtgattgatcaaatgaatatttatgctgctactcaggatgcaatgattcgggcagttaatcaccttcaccatcgaccagatcatctgattgttgatgctgtcccgttagcaattgatattcctcagacgactttgatcaagggggatcaaaagagtattagcgttgctgcagccagtattgtcgcaaaagaataccgtgatcacctaatgcgggactatgattatgtttatccagggtatggttttgcacaaaatatgggttatggaaccaaagaacatttagccggcttagaaaaaatgggggcaactcctattcatcggcgttcttttaatcccgttccaaaatatttaaattaaaaaatgcattttcaaaaagctttcgtatataaatatagggaggcttttttatgttacaagtaaacgattttctattacggttaagtttatgtcgcggaattggcttagtttcaaagtatcgtctatgggagtgtgctcaacaggcgcgctgctttaataatattgactatttgattgaccatgcaaatgttagcttacgaagtgcgtcgtcattgaaaaataattggacaagtccagagcttgatcaagcagtggccttaaacagtcaggaaaaatttattacaattgcggatccgttatacccgatcaccttgaaagaaacgtactgtccgcccttggtattgttttatcgtggtaatctgagcttgctccatcagccttcaattggtgttgttggcactaggcagataactaattatggacagagcgctttacgaggattgctgccaccagtaattaagcggcagatagtagtaatcagtggtttagctcaaggagtagatggttttagccatgaactggcgttaaaacatggtggccttactatcggagtgattgggacgggtttagatcaagcttacccccgaagtcaccaagtccttcaagatgaggttgccagacagggattagtaatttctgagtatgggcggggtgaatcacctgtggcttatcacttcccagaaaggaaccgaattattgcaggtttaagcgaagtggttttggttgtcgaggcaaagaaaaggagtgggagtttaatcacggctaatatcggtttagatgaaaatcggtctgtatgcgctattcctggaaggattgatgctcccttatcagtaggatgtaacagtttaatcgcagctggcgcgaaaccaattctcagcgcccaagatctgctagatgagtttcggctgtacgattcaagggcttgatttctggtgagaagttgattaaaatattttgttcaattagagattatatttgacagatggtagtcaaatggattaataatattattgaatgaaatattaaaaatgttaggagcctaccagaatggcaaccaaaacaaccaaatcaacggcgaaaaagacaactcgtcgccgttcaaaaattaaaaaaaatctggtgatcgtggagtcaccatcaaaggcaaaaacaatcggtaaatttttaggccggtcctataaggttgtggctagtttaggtcatattcgggacttgccaaaaagccggatgggggtagatattgaaaatgactacacccctgattacatttcaattcgggggaagggtgatgtaattaaggaactacggaaggacgttaaaaatgcaaaagccgtatatcttgcatctgacccggatcgtgaaggggaagcaattgcctggcacgtttcaaatattttaaagcttgacgatgatcaaaagaaccgggttacctttaatgaaattactaaagatgctgttaaagaagcttttaaggaaccccgagagattaatatggatctcgtggatgcccagcaggcacgacgggtattagatcgattagttggatattcaattagcccaattttatggaagaaagtcaaaaagggcttaagtgctggtcgtgttcaatcagttgccctttatctgattattcaacgtgaaaatgaaattaaaaacttcaaaccagaggaatactggacaattgatgctgatttcaagaagggcaaagaagaattcaaggctagtttttacggtgaaaatggtaagaaggtttccttgaagaataatgatgatgttcaggcagtcctttctaaaatcgataaaaagaaagatttcgatattactaaggtgactaaaaaagaacgtcggcggcaaccacagccaccatatacgacctcgaccatgcaacaggatgctaatcgtcgtttgaacttccgaacacgaaagacaatgatggcagcacaaatgttatatgaagggatcgacattaaagaaggagcaccggttgggttaattacctatatgcggacggactcgactcgggtggcgtcaattgctaagcatgaagcgtctaactatattcatgaaaactatggagcagaatatgcggcaataaagccggttaagggaaaattacctgaaggggcccaggatgctcacgaagctattcggccaacttcagtctatcggacaccagctaaaatgaagcaatatttaacctccgaccagtataaactttataatttgatttggtcgcggtttgtggctagtcaaattactgcggaagtaattgatacgatgagcgttaacctccagcaaaatggggtcgatttccgtgcaaatggatcaaaagttaagttccctgggtttacgaaagtatataagcgaggaactgaaaaagataacttgttgccagaattaactgaaggtgacaaggcaaaaatgataaaggacgatccagctcagcactttacccagccacctgctcgttatacagaagcggctcttattaaaaccttggaagaaaatggcgtcggtcggccatcaacctatgcgccaacccttgatacgattcaacgacggtactatgttcgccttgtatcacgccactttgagccaactgaattgggtgaaattgtcaaccgaattatcgaaaagcaattccctgatattgtcaatgtccaatttactgccgatattgaaggcaaacttgatgagattgaagagggtaagcagaactggattaatgttgttgataaattctatcaaccattctcaaaagaagttgatgcagctgaagaagaggttgataagattgagatgaaagatgagcttgctggcacagattgtgaaatttgcggggccccaatggttattaaaatgggtcgttatggtaagttctatgcatgttctcgtttcccaaattgtcggaataccaaggcgattgtaaaagataccggaattacatgtccaaagtgtgggcaaggaacggttgttgaacgaaaatcaaagaagaaccgaactttctatggttgttcccgttatccagattgtgacttcgtttcatgggataaaccgattggacgtaattgtcctaaggatgggcacttccttgttgaaaagaaagtcaagggtggtaaacaggttgtctgtccaaatggagactaccaagaagaagttcagaagtaaaaactctacttcatttttactgagttttacttaaacatttattgaaaagggttccaaaatctgctattgtgcgtttggaaccttttttatatacttaatgttaaacgattatcaattgaagggatcgataacaatgattactttacaaaaccaacaattaaccgtaaaaattgatgaattaggtgctcaactacatagtattaaacggcaggataacggaatcgaatacttatggcagggggaccccgcttcatggaatcgccaagcaccaatcctctttccgttcgttggccgcttaaaagatgatcaatatcaatatggcaaccaaacttatcatcaaacacaacatggttttgcacgtgatcgaaaattccaagttattgagcaaacaccatcgatggttgtgatggaacagcatgatgatagtgaaactaagaaggcattccctttttcatttagtcttcaagtaaaatttgaattagttattgataaagttgaaattagctatgtggtgaagaacccgagcggagatgaaaccttaatctatgccattggagcacatcctggttttaatatgccgttaactagtactgggagttttgaacaaacagaattaagcgttaaaccggcaacagaatattcacggatcattttagatggcgcctataacgattcagctcatccacaattgattaatatgcaggattcattatcacttaatcatgatctttttaataaggatgctattattttcaaaacagatggcggccattttacagccaaattaacggatactgttgctaatcacggggtcgtagttgatacttttaatacagaatacgtgggagtttggtcgcaatatccaagtacagctccatttgtatgtgtggaaccatggtggggaatagcagataatgtcaaggctgatgggctcctcctccataagcaagggatgcaccgtctagcaccaaatgaaacagataattatcattttagtattaagccattttaacgaaaaaataggagactgtgaaactttccatttccagtctcctatttatttagcttcttttctcgtaaataatagccaaggccaaaacttaccattgattcttttcctgataaaattcggtgaatgtttgatcggtggcggtaaaagaccactcctgttaatattcctgccacgattgctaaaatccaagcatgaatgaagagggcaataatgaaaattgcactaatccctaccatactggcggtactaaccatacttgtcaagcataagacaaagataaaaatcaaacaggcaacaacaaagaggagggggttataagctaagagaatccccgcgctagttgccactgctttcccgccatgaaaattatcgaatattgatacagtgtgaccaagactaccaaagagtccgatcaatagggggttaacggttccagatatccctaaaaagtatggctgactggcagcgagtgttccctttagaatatcgataaccaaaacaacgacgcccgccttaaatcccaatgttcgaaaggtatttgttgttccgatattaccgctacctaacttgcgaatatctttatgataaatatacttaccgatccagaggccagttgggattgaacctaagaggtaagcaataataatcatcccaataatttcaaaaatcatataaatagctccttaataatagcttatacagcttttaagcatagcatgaatatttaattttaaccactaggaagacacaattgtatctgtcaagttttcataggtagcctttaaatatacagttttagtgggttagtgccttaaaaagttgtcccattggtctacttgtggccgtgttaatcggaattattccttgtactgctccaattgacggctttgtcggtgcctttcttagaaactctccagttcgaatatgcatttcctgtaataggctggtttgagccactcgaggaagaactgttaattgttctaggattatatttaaactagcttgcagttcaccattcattcgggcttcaattaaaccaatcatggctttagccccctgcttagtccatgacttgccctgtttcttcatccggtaagtaaaagcccggtgagaactttcgactgaaccaattaaatgaatatccttaaatccacgcatttgtggtgagaggatataccgccaatttcgctgtagatactttcttaaacgcattaggtcatctgcttgtttttccgttaggttttgtgattcataagtatctaaaattattgttagctctgcttgatcatgatgacgaacggctttaattgctcgcatggctaattcgttgtgccggcctaaagtatgttcaattttctgcaaacaatgatagcggtcgagaaagtattcaccatgtgcactttgaggaactagacttaatagcttagctggttcgtaacctgggccagcgtcactggccaaaaagatcgtttgaccggcaagcttataatggcggtctaaataatcacttagtcgtgcttcaagccgtccttggtgcccaacactgagaaagtcatgccgattaatgatttgattagctactcgctcataaacccgataatggtgcacaagagtcagctgacctgcttcttttttacctttaatcataaaggcatcaccctcaatagttaaatttttaggcatatggcgaggagtagcttggtgttcttttgcttgagtttgtttagctacctgatttcctaactcatgcacggcgtgcattaccgaatcggcagtaattccgctgtcaaatacaaggttcaaaatgtcggcagtattgcgcattgtagttgtttgggcaatcttagccatcatcattaagtagtgtggcgataaacgacgacgtggtttaatttttaattgttggtctaagtaaaattcacgtttctttgtcccagcctgataataccgtcgttgaaaagtcaccgggccaaagataaaattaagcgtccgtggctgtttattaattacttgatagttcgctggagcttgggactttaagcttcgatctaagctttccaaaaagttttgcatgattacttgtcctaactccaataccccttttaaaataatctgttcagcttcaaataaactgcctgatttcaccaaattctgctcgatttctgttaaaatatccatgaggaaagacctgcctttgcttagtattcgacacactaaaggctactggtcttttctttttttgtaaataagtaaattggtctacaaaaaagatttccacgaccagatgaattattcatccaacctatgaaaatcttacactaacgacacaatttgccaatctactaagttttcagtatcattttaattatgaattgaaattgtggccggtttagctttacaattagcaaatgtaaatggtaaaataattttccgaacatacgtttaggtataatattggcaatgggaggtcattttgtggccaaagaagaagtaaaatatgatgcctcatccatacaagtattaaaagggcttgaggcagtacgaaaaagaccagggatgtatattgggtctactgactcacgtggattgcaccacctggtatatgaaatagtagataatgccgttgatgaagcattatccggttatggtgatgagattaacgtcaccattgaagcagacaatgcgattacagttcaagatcatggtcgggggatgccggttgggatgcatgcttccggtaagccgacacctgaagttattatgacggttctccatgctggaggaaaatttggtcagtcagatggttataaaacttcaggagggcttcatggtgttggagcttccgtagtaaatgccttatcatcacatttgacgctgacaattgtccgtgatcacgtccgttaccaagaaatttttaaggatggcggtcaaccagttggaacgttgaaaaaattaggaaaaactaaagctgagaacggaacgaccgtctcattcaagccggacccgaagattttttcaactactgtttatgactacaataccttagctaatcggctccgtgagtcggcctttttattgaaagggattaagattatccttaccgataagcgagctggtcaagaaaaacaagatgtattccaatttgacaatggaattcaagaattcgtttcttatcttaacgagggtaaggacgttttaggaaagacgctctactttgacggaaagcaagatggggtcgaagttgaagtagcggctcaatataatgatggttactctgagagcttgttatcatttgtcaataatgtccgaactccagatggtggtactcatgaagccggattccggagtgcctggacgaaaactttcaatgaatacgcaaaaaaggttgggctgttaaaggctaatgataaaaatctagaaggtagtgatgttcgggaagggttaacagccgttatttctgtccggattcctgaacgtctacttcaatttgagggtcagacaaaggataaactgggaactcctgaagcacggaagattgttgatgcgattgtcagtgagcagcttaactatgccctaatggaaaatggcgactttgctcagatgttaattcgtaaggcattaaaggcgcgtgaagctcgagaagctgcccgtaaagcccgtaatcaagctcgtggtggtaaacgaaagggcaaaaaagaacgcaatctttctggaaaattgactccggcccaatcaaaaaatgctaagaaaaatgaattattcctagtcgaaggggattcggccggtggttcagccaagcaggggcgtgaccgtaaattccaagcaattttaccattacgagggaaagtgctaaatacagaaaaggcgaagttagatgatgtattaaaaaacgaagaattgaacacaattatctatactgttggtgctggtgctggttctgaatttaacgttgaagattcaaactacgataagattattattatgactgatgccgatgatgatggtgctcatattcagattcttcttcttacctttttctacaaatatatgcggccaatgatcgaagctggaaagatctatattgctcttccaccactttatcgcttgcaacgcggacgtggagctaagactaatatcacgtatgcgtggactaatgaagaattaacaaaattgactaaaaagatgggcaagggagcacaattacaacggttcaaagggcttggtgaaatgaatgctgatcagttgtgggaaacgacgatgaatccagaaactcggacactaatccaagttcggatcgaggatgctgaattagctgagcgtcgtgtaactaccttaatgggtaataaggtggaaccacggcgagaatggattgaagaaaatgtccaattcacgttagccgatgatcaagaatctgataaattagttgagaataaaggacaattacctcaaactaaagagcctacaattaatacatggaataaatagagaagggaatcaagttttgtgagaaacggaaaaattgaacatatgacgctcgaacagatcatgggtgatcgttttgggcgttattcaaaatcaattattcaagaacgagctttacctgacattcgtgacggattaaaaccggttcagcgccggattttatttgccatgaataaagatggaaatacttatgataaagggtttcgtaagtctgctaaatcagtcgggaacgtaatgggtaacttccacccccacggtgatagttcaatttatgaagcattagttcggctaagtcaggattggaaattacgtgaacccctaattgaaatgcatggtaacaatggatcaatggatggtgatccaccagcggccatgcgttatactgaagcgcggcttagtaaaatagcaggtttaatgcttcaagatatcgacaaagatacagttgaaatggccttaaactttgatgatactgaaaaagaaccgacagttttaccagcacgtattcctaacttactcgttaatggagcaactggaatttctgctggatatgctactgagattccaacacataatttaagcgaagttcttgatgcactgatttatcttatcaagcatccaactgcttctttggataagttaatggaatttattcctggccctgatttcccaactggtggaatcattcaggggattgatggcattcgtaaggcataccagactggtcgcggtcgggttgtagtgcgagcaaaaacggagattgaaaccttgcggggtgatcgtcaacaaattaatgtgacggagattccttatgaagtaaataaggcgcaactagttaagcgaattaacgatctgcgccttgccaaaaaagttgagggaatcgcggaagctcgcgatgaaactgatcgtagtggattacgaattgcaatcgaactaaagcggggagctaatgcgaacggtattcttaattacttattaaagaacactgatttacagattaactataacttcaatatggttgcgattgatgaccagcggccaatgcgtgttggattgaagcgaattttgacttcctatcttgaattccagaaagagattattcgtcgacggacacaatataacctaacgaaggctcaacaacgattgcatattgtcgaagggttaatcaaagcactctcaattttagataaggtcattaaaacgattcgagcaagtaagaatcgtaaggatgcaaaggaaaacttagtaaaagaatacaactttacacctgaacaggccgaagcaattgttaccttgcaactttatcgcttaacaaatacggatgtaactgagctgaaaaaagaacaagaacaattaaattcacggattaatgaatatcagttaatcttgactaacgaaaatgagctagcaaaagttcttactaaggaaattagggccattaagaaggaatttggcaatccacgacggaccaagattgaaaatcttgttgaaaaacttgagattgatactaaagttacggttgccaacgaagatgttgtggtcttagtttcgcatgcgggctatatcaaacgaagcagcattcgttccttcaaggcatcggaggcagaagaaaacggtctccgagaagacgattacccattattgattcaacaaacaaatacattatcgcatttatttatgtttaccaatcttgggcatattatttaccgcccaattcatgaaattgcagatgcccggtggaaagataccggcgaacatatctcacaaacaatcggtttagcggataatgaagagatcattaaagcaatgatttttgataaactagatcagccaggaacaatcatcatgggaactagcgatggtcaagtaaagcaaacggcctttaatgactataagcctggttcacgttacaagagccatgcaagtgtcgcaattaagcttagggataatgcgcaagttgtaaatgttgattactatgaaccaacaaatgagaaccgttcactattgacgattagtcgccaaggatatgcagtgcggtatgatgttgcagatgttcctgtaacaggaatccggacagctggtgtacgggccattaatttgaaagatgatgaccaagtagcagatcaaatcttggttaaggatggtcaagatattgctgtaattactcaacgaggtgcatttaaggaaatgccagttgatgagattgaagttggggcacgagcacggcggggcgaacttgtccttcggcggttgaaatcacatcctcatgaaattgcagacttccttgcttacgaccatgattatcaaggtgcttttgagactattactaaccggccagcattccaagatataatggctactgaccatcatctaagttcgattaagtcaaatggaacttttgtaattgataccgatacgcaaggggaaccaataaaacttcgaatgaaacaaacgaatgttttatccgaagaacctgttagccaaaattaaaagaaggcgaaaagtttggcgtatattaaagaaattcgtgatttagttgggaatcgtcccttaataatgaccagtgcttctggggcactcttaaacaagcagaaggctgttttacttcaagaacgggcggacactggtgattggggtttcccaggcggctacatggaatttggcgaatcttttgagcaaactgtaaagcgggaatttaaagaagatgcgggaattgaagtcgtgcctgtcaaacgactagcaatttttgatcagaatttttacacttatcctaatggtgaccgcgttcaaccagttaatgctttttacttagttgaagaaagtagcgctaagcattatcagcccaaaattacagaaacgacaactactgaatatttttcgttagataaagaaccaccacgtttttttaacagtcagcatgaacaaatgtggcagatcttaaaagattttattcataataggaaagatatttaataattgttctttaatctattaacttccatgatagaatagaaaatgtagattgtttcacctactagaaataactaagattaaagtagtgaacaaacaggaggaatttatatgagcaaagaattagtatttggacaccaaaagcctgatacagatgcgattaccgctgcaatggcattttcatacttccaaaatcaattgggatacgaaactgaagcagttgctttaggtgaaccaaatgatgagactaagtttgcattgaagactttcggtatggaagcaccacgcgtaatcgaaaccgctgcaaacgaagtagataaggtaatgcttgtagaccacaacgaaccacaacaaagtgttaatgatatcgacaaggtcactgtaacgcacttagttgaccaccaccgaattgccggctttgaaacggctcaaccactctgggcaactgttcgtccttacggttgtgtaagtacaatcattacagaattgttccaagaaaagcacattaatattcccgctaacttggctgggatgatgctttctgctatcatttctgataccttgcttttgaagtcaccaactacaactgaccacgatcgtgaagctgttaagtacttagcaaagatcgctggtgttgaagattacgaaaagtacggcattgaaatgcttaaggctggtactaaccttggtgctaagtctgatgctgatatcgttgatggtgatgctaagacctttgaacttggcggcaagaaagttcgtattggtcaagttaacaccgttgatttagatgatgtttttgctcgtcaagctgatcttgaaagtcaaatgcaaagtatgatggatgataacaattatgatttattcttattaatcgctactaacatcttaaacagtgactcagagttattagttattggtgatcctgctgaaaaggttgaagcagcctttggtaagaagcttaacgaaaacaagcggatgaatttaccgggtgttgtatcacggaagaagcaagttgttcctcctttgactgatgcattcgaaggttaataaataaattaatttaaaaaactgagaaagattttgcgatttttctcagtttttttgagctttaaatttcaaagcttattcttaattagttaaaatataagtacagattttaagaaatggggttgatattaatgaatatcacatttactgatcaagctatcgaacgtttacagcgttatgaactgtcatctaagaagatactcctagattttgatgatggggttggtccattttctgccgttgggggttgcagtttagatggtgattatcgactaatccttgtcaaagaggatttagatacccccgattataatgaaaagattacctctaatttaggggatgtttttattaaagaccatacagcagttcaatttgatgatgaaatggaagtaaggtttaacccgcgttactttacaatgccacttgtcagtcctaaacgcgttttaacagataatcttgaagttctggatcttagtaatacagacttaaattctcaaattgatcgagcacacgattgctagcaatataataagggagcgtgatagaagccagatacgacttcatgatcatgctcccttattgtttttaaagaataatcctgaagataaaagtgataataattgcaaaaattccaataatcgttgcataggaaaaatgtttacgttgagctggtttaattaatgcttgtctccccatgaagattgtgaataaagcccataaaaaagtagcaataagtaaaatatacaatttccagttgattgggagatgatggtaaaaatcgccataaaataccattatgccgataaacatcacaatagcataggcatagttatcgcggtgaaagttaaaattaaaaagataagcaaacgcgcaaaataataaaatgctaataatatcgttaaaaatcataccctctacacacttccttatgtagtcattaacaggataaagataaaatattaagaagcaatcgcaaataatatgatatgatgatcttgttagaattaacgaaggcggtgcttacagtgaagaaaaaagctatgcgacgagaaataaaactattaactgaagaaaatcaacaattacggcgatataccttgctagcatcaatcggaattttattaagtatgatgattgggttagttcgaatggttcagaaaaattagttcaggaaattttttagaggaaagtatagtggagttacaataccgcaaagcgacacttgaagatttacccaaaattgttgaaatttataatcaaattattccatcacggttagcgactgcagatctcaccccgataacggttgacgaacgcaaagaatggtttgaagcatttgacgaaaatcatccaatctgggtaattgaacatcaaaatgaggttctcgggtgggtggcccttgaacatttttatggtcgtccagcatataatcatactagtgaaattgctatttaccttgatcaacggttgcggaaacaaggagttggtacaaaaaccatggaattcattattggtcaattgcctaatttagcagttaatacaatcgtggcttatatttttggccataatattccaagcctaaagttatttaaatcgtttggttttactcaatggggccttttaccacaagtagcagagcttgatgggattaaacgtgatttagttattttaggccgccattttaaatgattattatgtaaaagagtgtgataaaagttcagtcacatttcgaaataggcccccaacgcccggtaaagccgaacgctggaggcctatgttgcatataggggcttcatgttgaaaacgaaagtgcccgtgatacttggctcgttcccttattttgtatctttttctacttcttctcttgttttaacatcattgatatgtagctcaaacttaactaaattcaagccagtcattttattgattgcgtgttgtacctcagaacaaactgccttaaaaatttctggagcgcttttgccatattcgatggtagcttccatttttaatgcgacttgcttttcaccaacatcggcattaatacccttggttggattgcttccggaagttactttatctgctaattcactaaacatatttccatcaagggaaaggattccaggaactttgctagcggtgatcccagcgattttttcaattacttgatcatcgaatgttaattgctcatcaattgttttattatttgtagtggttgtcatattaattcctccttgaattagttggcaaatttatctaacatttttatcgcaagtttatttaatgaatagcctcttgcatcaagaacatagccaattccgcctaagatagtgacagctaacagaatgccaatcattgggaaaaagccccacataatccaactaatgctgataagcagtcctaagataacgccaattgtagcaagtttcatatagtacctcctttttagacaatgttgactgattctttgtttgagtagggacttagcttaatgtgtaatttattaagatcaatgtcgaagtcccgtttaaggttttctttaattgtctggagtagtactgtatgaattagttttggattggtcctcttagagagcattccatgaacggtgacgtctgcgttgtgattgttacggtgcatcttgaggttaatcactgggttataaaggtcaaatttggcaattgaagtagttaagctgtgttcaactgcatgctgatcaatttgaactttattagcgccatctctagcgattgtcatttgtttagttgttgtgggacgaaaaacagcaattgctattacggttaaagcaacaatgattaaaaatactgcgactcctgctgaaaaactttgaccgatggggctataaagccaatcattaactggaattgtccaagtttggtcacgataaaaccataatgatacgacaacaattccaacgattacttgaagcatcattacaaatgaaacccaccattttttccatgcggccattagtaccacttcctttctataaataattttttagtacaagctaatagtaacatgtttggaagcgttttacattactttttgaaatgctaaaggtaatattaagaacctgttaacagaatagtcataattaaaaaatcgatctcacatcggaaaatgattgtaagatcgattttttgattctttaattgttttggcgttcttgtagtttagcgatttcagaataagccggagcaagcatatcttcaatttgttggaagagtggagtatagcgttgatatacttttactgcggctggatctggttggtaagaactaaccttaccaatgaacttctgtggtgtatcaagactgtcgatcattcccaggctttgcatagccataactactgacccgaggcagccagattcaaatgagtcaggaacgttaaccggacagtttaagatatcagcaagcatttggcgccatacttttgagcgagcaaagccacctgttgcagtaacgctcgctggttcaccgactaacgctcgtactgcttggaagactgttgcaatgttcatgctaattccttccataactgctcgtagcatatcagcccgtgtatggatatgagaaagcccaaagaaactaccacgcgctttagcattccacaatggtgcccgttcaccgcccaggaagggatgaaagagaagcccatgcgcgcctgctggtactccttcaataacgtgatttgccaaagtataaggatcgacctgttcgtttttaactgcgctactatcgacaaggtgttttactgcccattcatagacatcgccaccgttattaagcggaccaccaacgacccacaatcctttattaatagcatagcagaagaggcggcgttctggatcaataacaggatgatcagttacgactcgtacagctgcggaagtaccgattgtaattgctactgtattttgcttggttgcaccaacaccaatatttgaaagggcaccatcgtaagcaccataaacaaatggcgtatcagctggtactcctagtttttcttgggcttcgggcactaaaccagttgcttgagttgttccatcgacaatttcaggcagttgatctttggttattcctgcaacccgaagagcctggtcatcccaatcacaagttttaaggttcatcaagccagttgaggaagcgattgacatatcaaccttaaattcattaaataaccggtagaaaaggtaagccttaatatcagcaaaatatgctgtgcggttaaataaatcaggttcgtcttcccttaaccaaaggagctttgtcaaggttgacatagggtgaacaggaacccccgtcttcatatataattgttgtccttcagtcatcatcttaaggttgtctgctgcgcgctgagctcgactatctgcccaagtgattaaccgtgaaagaggcttcttatttttatctaataagaggaggctttgatttgcacttgaaattgagactgctagtagtttccccgtactgagatcagctgccgtagccacatcatggatagcttgttcagcagcattgattacttcttctggctcttgttctgccattcccgcggcattgcggtgcaactcgtagccatagttagcttgtgtgatcacctgcgcatcttgaccatataaaacggcctttgtgctagaggttccaacgtcaacaccaattaagtagttcatttattgttctcctttaaaactcaatttaattctctttgtaatattatatgctaaagtgactggtgtgcaatgatttcaactggtaaaagggtagtggaactgatggtactttgttggttaatctgtgttaaaagcttattagctgctaagctacccattaactccatatcttgcttcaacagaaagattccattagcgacatattgcgaccattcccaatcatcaaagctaactaagccaagatcgtcagggaaggaaaggtttagttccttaaaaatcgctaaaagatcaaataaaatgggccccattaatgaaacgacagcagttttgcctttgagttcatttaactgttgcaaaaacattttagcaagccactgccgatcatgtccccgagtttcaatattgtgatagcttagcccattatcagcagcagcaacctttaaaccggcaattcgagggatttgacccgatgcctccgcaaaatgcgcgctgacagttaaaatattctgataaccattttgataaagaatcttaccgaggttataacaagcatcacgattagcagaagtgaccttcccaactgtagaaggctggtcatcaacttcacggtcaacaatcacgaggggaatatcattgtgaatagtaggggcaaattgactaaagtggcgggaattaggctggacaataattccgtcaactcgttgctgatatagacgctgaagagcacgactttcattttcccgcgagttattcgtattcatgaggaggatatcatagcccgcttgttgcaaaacatcatcgatccctttggcaagtaaagatgaaaaggggttagaaatatctccaacgaggattccaacaacgtgactatgagtttggcgaagctgtcgtgcagaagcggttggaacaaattgaaggtctttaattgctttttccacccgtttccgcgttgctgggcgcattttatcataacgaccattaataatacgtgaaacggtagtcgctgaaacaccagctgctttagcaacgtcagcgatagtagtatgttgcgtcatttgtttattcatcatccttaatagttctactattattaagaataccaaaccatacaaaaagcgtcactagctaattcactaggacgcttaaattgacttagacaaataatgaaatggcgtagacggctcccaacccagcgagtgctaagacggaagttaaagttgtccacgaaagtaaagtttcctttaatgaaaggccaaagtattctttgatcatccagaaaccggcatcattaacgtgtccacaaaagacagaaccagcaccgatggaaagaaccatcaatgttgccataattgagttaccgccaaattggtgagccattggaaccacaaggccggcagcggtcatcgcagcaactgttgaggatccaagtgacatccgtaataaagcagtaattaaccaagcagctagaattggtgaaatgttagtttgagcgaataaaccagaaatatattttgaaattccaccatcaacaaggacttgcttgaaggcaccaccaccaccgatgatcaaaagcattacagaaatttgcttgattgagtcggcaagggcggttgaaatttcttccattttcttgtttcgccataatcccattgtaaagattgcgaagattaatgaaagaagcattgcaaggtcaggagcaccaataaattgaatgaattcattaactggattgttcttagggaaaataaatgaacaaatagtagcgacagcaattaagataactggcatcattgcagttaaaacggagataccgaatttaggcgtttcttcaagcttgaattctttatattcgccaagaactgaaatatcaatatttttacggtaaacacgcggataaactttttgtaatacccagttataaactggaccagcaataatgattgttgggattgcagctaaaataccaagcagcaagacgtgtccaaggtttgcaccaagaatgtccgtgatagcagttggagcaggatgtggtggtaagaaagcgtgggtaacgtttaaggttgctgccattggaataccaagatacatcaatggcatatcaagctcgtgggcgataataaagataattggtaaaacaacgacaagcccaacttcaaagaataatgctaacccaatgataaaggaggcaaggataacagcaacttggatccaacgccgaccaaacttattaatcaatgttgttgcaattcgatatccaccaccggcatcagaaactaatttaccaagcattgacccgaaaccaaagataatagctaagtgtcctaattggcccccgatcccggtttcaattgtctgcggaatttttgtaagtggaaggccgagtaacaaaccaacgatgaatgatgtgattactaaaccaacgaaagtgttcatctttagtttaacaatcatgaaaattaagataataaccccgattaaaacaataagtaaaggcataataataaccccctaatgagtagtagattgttgttgtaatttagcgatggtcgaataggctggtgttaataatccttcgacctgcttaaaaagtggtaagtaattttgataaacattaaccgcatcttgatttggctgataagaactgatatcaccaactaatgttttaatgatttcatagttttcaatcattcctaaactcttcattgccatggtgattgcaccgagacaaccagattcaaatgagttcgggatattgaccggacagttcaagacatctgctaacatttgccgccaaacttcagctcgcgcaaaaccgccagttgcagttacgcttgcaggattaccaacaagatcacgaaccgcttggaaaacagttgcaatattcatacaaattccttccattactgagcgcagcatatcggcacgagtatgaatgtgggaaagtccaaagaaactaccgcgcgcattagcgtcccataatggtgcccgttcaccgccaaggaatgggtggaagagcaaaccgtgagctccggcgggaacaccttcaataactcggttagcaagagtgtagggatcaatattttcatttttaactgcactagcgtcaactaagtgttcaacggcccactgatagacatcgccaccattattaagcggaccgccgatgacccataaacctttatccacggcgtaacagaagagtcgttgctgaggatcgatcactggatggtcagttactacccgaacaccagccgaagttccaatcgtaatggcaacagtattttgcttaattgcccccacacctaaattagataaagcaccgtcaaaggcaccatagacaaatggcgtgtcagcggggatacccatttttgcttgcgccgctgctgttaggccaatcgcttgggttgttccgttcacgatttctggtaattgggaacagtcgacgttagcgagttccaatgcttgatcgtcccagtcacacgtattgacattcatcattccggtacatgaagcgatggaaacatcaaccttaaatgtattgaaaaactggtggaagaggtaggatttgatatcgccaaaatatgcagtttgagcaaccttatctgcttgtgtcttattgagccacataatcttggtcaatggggacattggatgaataggtgtacctgttttagcatagatttgctgaccagcaggactattctttaattcgttggcgacatcacgtgcacgggtatcagcccaagtgatgacccgtgaaaggggattgaaattcttgtcgagcataatcacactttggttagcactagaaaatgataccgctaacaattttccatttgttaaatctgctttttgtgctgcatcatgaataactttttcgactgcttcgacaattgcagttgggttttgttcagccattccactagcatcgcggtaaagggaataaccttggctaaattgatctaacacagttgcattttggtcatatagaactgcctttgtagaagtagttccaacatcaacaccgataaaataattcattgtagtaattctccctttatttatttgaaaacgctttagtttatcgttacacctaataatataatattagatgtaagcgatgtcaatagcttatttaatataagtttatcgatttcctaaaattaaaaataaaaagtaattgcatatgaatctcaaggtgtgatactattagttgcttaatttgttatggtttagctataagcaacgattttaaggagggattacaatgaaaatccggaaagcaacaatggcagatttagatgtagtagtagatattttacgtgatggacgtaaccagttagctgagcggggcgttgaccaatggcagggggattatccgaacgttacccatgtaaaagaagatattgagaatggttatgcttatctcgttaaagcagatgatggacaaacagttggcacgttagcaattgttgaagcaccggatcatttttatgacaaactcaacggggaatggctaattaatactgaaaattatgttgtaatccaccgcgtagctattcattcacgacacgcaggaaaaggatatgcatccaaattatttttgagtttgattgagtatttggagaccgagcgtccagaaatcaaatcaattcgtttaagcacaaatgaaaataatatggcaatgcaacggatcgcaactaagagcggctttaaaaaagtggggaccctccatggcgcctttcgtccaagtgagttgtcttatgtttatgaactgttaacaaaagtgcgtgtagcataaaaaaggggaaggcgttaagcttgtaacaccttcctctttacttttattatttttcattaattttcttagcatattcgcgagcgttgtaaagttcgtagactacccatgtttcaataagggtaatgacacagatgagaatagcggtatacacgtctggtaaaacaaacagtaagagtaagaagatccatgaaatccatgaccactgagtttcaattgtgacgattcgctgaactcgtttagtaggttcaatacggccagattgattaaaaatggttcgaatttggtaaaaataacgaacttcaaaaatactttcgataataaaaattgccgttaagatgattaataaaatgttcatcataaataagagtcccttatctttcaatttatttctaattttagaactcttgggcaagagaagcaatttagatagtaaaaaaataggtccctatcaaagattgagtgataggaacctatttttaattctacatatcaagaaattaaacgttcattgttttaccatattcattattaatggtatcaacaacgtccttggcatgcatatcatcttcaacaactgtttcaccatcacgaagagtgtactttacactttcgtccaagttatcaaagtctacatcattaccatctgcatctacaaaattgaacttcgaatcttggaagttcttaagagcatctgcattaatttccatgattatgcttcctttcgccattatagtaacacttaattaacgaaaattacagggttagggtaaaaatattattatattttacaggaggacatttattttctaaattaacttattcgtgttttcgctcatttttttgataaacagttttgactaatcctgtacataatttataatatgagtaggaagagaattcttggattgaataggaggaaatagatatgtcattgatgcaaaatacctcagaaattaacaagactgataagcaggtgtacttaatcactttattgcggaagagtacaaacatgccacaatacattgaccacatgatttatgaaactgcagaaggtggtcaagaatttatggcgcgcttagtcgaagctttttcacgggcaggttaccgggaaaagaagcttagtgacgataagtacaacctcgataacggacttgataagatcactttgcggggttcataccaacctatttacaagggataattaaaattgactaaattaaaagagctgatgctgcattttgaggcaccagctcttttaatttaattattgtttcgtaatgatagaaccttaacatcgttgtcgtagttagcgctccaccaaccttgtttattgacgtaaccagttggcaagcagagaatcactaagaagattatatcaatgactgaggaaatagtttccatcactgcactgtcgttacttgtaaaaataagggaaagtaaccagaaaaccaatacggtccagccagtcaaaccggtatcgcgaacccgccggacacagatagcaattccgggaataataatagcaatagcgaatactgcaataacgaagagcaagaaaattaagaatccaacgccacgattatagccattcataatcgaagtgacagaagcaaaaccagcgattgctagtaagaaatataaaataacaaaaatgatgaaattaactaatactggccaccaaaaatccgcccgcgttgaagtagcccggtacttaaaggcgttttcccagtagtatttgtaagcttcaaacatacaattctcctcctttgataggtttgctttgattatagcattttggggggatgtagattgacttatgatttggggaggataaaaaatccctagccttggtaattttttatcagggttagggaattactattttatattgaaaactaaattagataaattgaactccaccgtcaatttggacagcttgaccagtcatgtagtcagatttgtctgaagcgaggtaggagacaaagttagcgacgtctgatggatgttcaacacgaccaagagcaattccgtcaatagcggcctttaagtattgacctttttcaccaccattttcttcaaccatcttttcgtcgataaagtcccacatatcggtacccacaatacctgggcaataggcattaaccgtaatattaaatttagctaattccttagcagctacttgtgttaatccacgaatagcaaatttagttgaagagtatgctcctaattgttcataaccaatgtgtccagcgatacttgaagcattgatgattttacggattttatctccatcatcttgcttcctgaattgttcagcagcagcttgaatcccaaacagaacactatcaacattagtagcgtaaattttatgaaattcttcggctgattcgtctaggagattaccaatttgtgcaattccggcattgttaatgtaagtgtcaaggcgtccaaagttatccacagcagcttttacaagcatttcatgagtttccttttttgaaacgtcaccaggagctgccacaaccttatatcctttgtcagctaattctttggttgtcttgtctgtttcttctttatgataaccattaatgaccattgcatagccatcttttcctagttgttccgcaatgccctttccgataccacgactactaccagtaataacagcaactttttgttcagtcataataaaatctcctttaagtataaccttaatttctaacaacaagttaattattgcataaattaaaaataaaaggatacttttttgctaaaacttagtaaaatgcttaaatgtttttacttacgttgcataggagtgttaatttttcttataatgttaaagaatataaagttaaagtgggttattaaatgactatttggaagagcgaattagcatttgaaaatgaattaattaaccatcttagtaatttaggtggaactaagcaatgggaatacttaccacagattaaaacaacagatcaattgtgggacaactttaagcgtattcttgagcaacataatcaagaccgcctagagaaaccgttatcgccaaccgaatttaatcaagtgaaggcgatagtcaataaattaaatactccctatgaagctgggcagtttctatacgggactaatggaatatcgcaaattgaaattgatcgtgatgatggtaaacatgtatatttaacagtttttgaccaggatcaaataggcgctgggaatactgtttatcaaattgttaatcagattgagcgtccagcagtaattccaggacggaagaatcgtcgttttgatgtaacaatgttaataaatggtttaccgattatccaaattgaggaaaaagctgatggtcgggatgctaaagaagcgttaaaccaaatgcatcaatatatcgaagaagaccaatattctgatatttttggcactcttcaaattctagttgccttaacaccacatgatgcacgttacatggctaatacgacagctgacaagtttaataccgattttgcttttcaatggcaacgagcaaaggataataaaccagtgctagatgcaatgcaatttgcggatctaatgttatcgattccgatggcccatcaaatggcaacaaattatatgattttggatggaacaccccgtcatcaaatgataaagattatgcgtccatatcaagtttatgcaacaaaacgggtcattaacaaaattcgtgagcatacgtttgggattgatgatcaacgaatcggatatgtttggcatacaactggatctggtaaaaccatcagttcatttaaggctgcctggcttgcatcacgattacctaatgttgataaagttgtatttatggttgatcgagtggccttaactaaccaaacagttgatgaatatatggcgtatgatcctgaaaatactgaaggaagtaatgggggagtagttactgatactgctaatcggtgggcattagctaataaattgaagcgtaaaggaaacggaattattgtaacttctactcaaaagatggatgcaatggttcgaagcaatgacttcaagcctgttgataagaatcttgtctttattgttgatgaggctcaccgctcaacttctggagaaatgctgcaaagaattcggaaagtttttcctaaatcggcctgggttggttatactgggactcctgtctttccagaagaaaatggtaagtctaaaacgccgacaactcgtgatatctttggggatgttattcatacttatacaattcaagatgccattaaagatggtaatgttcttggattcaaggtggattttgagacaacattaactgaaaaagtactgagagaacaatatctgccagagtattttaaggctcgctatcctaagatgacagatgaggaaatccaagaacgaatcgccaacatgaatgaaaacgacatggacgataaggttgagccaagtgtctatgatgaaaatcataaacatgttgagttggtcgttgaggatatcttgaaaaattggaataaacgctctgttaatagtaagtacaatgcaattcttactactcatgttggtggcgggaaagcatcaactccaatggcgatggagtattataacgaatttaagaagcaaaatgcgaaaagggaacatccattacgaattggaattacctttagtcaagatacgtccaatggtgataatcagctagagacaaatgattctttgcgtaacgcaatgcaagactacaatgaaatgtttggtactagctttaatgataagcaggttaaagaatatacagaacaagtagtttcgcgattgaatcggacaattgatgatggcaaatactttgatcttgtgatcgttgttgaccaattattaacgggctttaatgcaccacaattaaatactctttatgtagatcggacattaaagggtgcagctttaatccaagcatattcgcgaacaaaccgggttcaggatatgcaaactaagccattcggccgaattgtaaattaccgatggcctaaacacacggaaaagttaatgaaaagtgcattggcaaaatatgcaaaccgcaactccgctaacattcaagaagaactttttaacgatgaaggtaaaaacgatggtgttattgccccttcctatggtgaagttaagaaagagttgcataaggtagtaaacaggttagctggtttttcagaagattttactgatatcccagcaagcgaaaatgcacaagaacaaatgtacaaagacttacgccaatataaccatttgatggcaattgccaaacaagacgataaatatgacgatacacatcctgaaaaattattaacttcattggggatgagcttggatgatgaagaaatcttaacaaccactttagcaaatcggctaaaaacaaaaattgctaaaaggcatcatattgatttctcgcaagttgacctccaaatggaacacgttaaagaagtgaaggtcaattgggattaccttgagggattgattgttgaagtgatgaataagtatcacgataacgacattgagggcgctaaaaaatccgctgaagaagtaaagattatttctgataaattagaagatcggggatatgcggccaaaattctaagatttattaaggatctcttcaaaggaaaggttaaatttgaataccctgtgcaacaaaagcacgttaaaaagttaattgcccaaaataatgaagggcaacaacgttctgccatttttgagtataagaaaaagtggggactagctgatattgaagattcacatttaataaatgaaatcttagataagcatgtcattggcgccgatgacctaaacggaaatggagagctcgacaacatcgtcatggaaggccaagcagtatacaagactgatgctgaagctgaagaaatacgaaatatgaatagatttaaatatagaaggatacttcgtgaaaatataactgaatttgctgatgaactaaagaaaaaatattaggagttttttaattgagtactacaagagaaattgagagtcagatttgggaaatggcgaatcgcttaagaagtaatatggatgctggtgaatatagaaattacattttaggtttcgtattctaccgttatctatcagaaaatcaggaagaatatttattaaaaggtaaagtagtatttcctgaaaataaccaaagtgtaaatgatgcatatttgggtataccagaagaagaactagttgacgcattacctgaaattgcaggggcattaggttatgcaattgcccctaaatatacttgggcatcaattgtcgatagagtcaataacaatacaattgcaccgtcagactatcaagatatgttagataattttaatcataatttgaatcttaatcataatgctaaaatggatttccatggaatttttgatgatatgaatcttggaaattctcgcctaggtaatactactgctgctagagctaaagcattaacagatattgttaacttgatagatcaaattgaatataaagatgaaaacggcaaagatatcctcgctgatatttatacttatttaattcagcagtttgccacaaactcaggaaaaaaggctggtgagttctataccccacaccaagtttcagaaatattagctaaattggtagctttagatttagactcaaagattcagaatccagaagtatatgactttgcatgtggatcaggctctctcttactgacggttcaagatcaagttcctggtaagaagttaaaatatgctggtcaagaactaaacacgacaacttataatttagcgcggatgaatttaatgatgcacgatgttcgttaccaaaacatgacgctaaaaaatgcagatacgcttgaaatggattggcctgatggagtagacgaacatggggtagatcatccacatagttttgacatggttgtggctaatccgccttactctgcacgatgggataacaatgataataagctaaaagatcctcgttttaaggagtatggagcattggcaccgaagacaaaagcggactatgcctttcttttgcatggcctatatcacttaaaacaagatggaacgatggcaattgttttgccacacggggttctattccgtggtgctaaggaagctcagattcggaaagctttattagagaaaaatcagattgatgcaattattgggttgccagcaaatttattctattcaactggaattccgacagttgtacttgtcttaaagaagaataaagaaaataaagatgtattgtttattgacgcaagcaaaaactttgaaaagggtaagaaccaaaacgtcttacgaaaagaagatattgataagataattgatacatataaggaaagaaaagacgttgataagtatgctcatgtggcaacgatcgatgaaattaaagaaaacgactataaccttaatattccgcgatatgttgacacatttgaacccgaaccaccagttgatcttgggaagttaacaaaagaaatggaagagactcaaaaagagattgaacagacccaaggtgagcttttggggatgatgaaagagctaacttcaaaagacgagaagacccaaaaagacttaaacgaatttatcaaaatgttagaaaacgaggtaaagcgtaatggataaaaagcccgaaaaattggtgcctgaagtccgttttaaaggatttactgatgattgggagcagcgtaagttgggggaggctcttactgggtttgaatatggtcttaatacacctgcaactgactacgatggtataaataagtatttgcgtattactgacattgacgatgtatctcataaattcgatatatcacatttaacttctcctaaattaaaagatgataattatcttttagccaatggtgatattctatttgcacgaactggtgctagtgttggtaaaagttacaggtacagtaatatcgacggtaaagtgtactatgctggttttttaatcaaagctcacattaaagaccacttttctactaattttatttttgatacaacacttctacctcgatatcattattttgttcaagtaacttctatgagatctgggcagcctggaatcaatgcaaaagaatatcaaaaatatataatttataccccctcggagaacgaacaaaacaagattagcgatttaatactaactattcaaaaattaattgatctccagcaacgaaaattggaacaattaaggcaacttaagattttttcattacagcgaatgtttattgataaagattgtaaacaaccaattttaaggtttaaaaactttaatgataattggttgcctcataaatttaatgatatagcaaatactttttctggaggaactccggctatttctaataaggattactatggcggtaacatcccattcattagatctgcagaaattaataaaaataccactcagctacatttaacaccagatggattaaaaaattcatctgctaaatttataaaaaaagggacacttttatatgctctttatggagcaactagtggagaggttggaatagctcaaattgatggagctattaatcaagctgtaatggcaattaacttaaaaaaagacaacgtgtattttataaaaacttggttaattaagaacaaaagaaaaattatttcaacctatcttcaagggggacaagggaacttatctgctaaaatagtaaaacatttgaagttaagtttacctaaaattgaagaagaaaacctaataagcattacgataatgaaaattgatagtttgattaaactccagcaatctaaaatcgatcaattaactattcttaaaaaatatcttcttcaaaagctctttatctaatttattgcatgaagcgtaacctccaataaataatacatttgtgtttttgacactagattatttattggaggttttattatgtctcggaaacactacagtacaaagctattttataaatactatatggattggattaaactttataaggaaaaagcagttcgaaaagtaacgttggataaatattatttaacgcatagaaaaattaaagaacttgcaccagagttacatatgaatgaacttactcgccaatcatatcaaaaattgttaaataactatgctgctactcatgaaaaacaaactactcttgattttcatcatcacctaaaagcagccttagttgatgcactagacgaaggattactggaacatgaccctacacggcgagcaattataaagggagttgatcctagcaataaaaagaataaatttttgaacctttatgaattgcaaaaactactccgccatcttgatctaggtgacgaattaaactgggattggtttattttattagtatcaaagactggcttacgatttgcggaagcgttagccttaactccagaagattttgattttgaaaggcagcaaattatcgttaataaatcttggaattataaaacgccaattggtaattttcaaaaaactaagaatgaatcttcaaatcgtgttgtgatggtcgattggcaccttatgaatcaatttaagtcacttattcgaaataaagaaagtgactggccaatttttgtgccacacaataaaagagtatttaactcgactgttaatggcttgttagaaaaatattgctataaattagatataccaactatttctgttcatggtttacgccatacccatgcctcattattactttatgaaggagtgtcagttgctagtgttgctaagagactgggccatgccaacactacaacgacccaagaaacctatattcatattattgaggaactcgaaaataaagataataataaagtcttacatcatctatctcaactgaactaaacaaaaagcggtaccagtaaactaaatgctgataccactttttttagatgaaaagcttttgtaaaagatactttttcaaggcgattagttgagtatgtttgttttgttggagactgattagtgcttgaatctgtgaaaaaagattagctattttttgttgttcatcaaataatggatagttttctttgaattcttcaatatctttttttgataggtttgtttgacctacaccatcatcgaacttcaaaaagtatcgattcctgttcattaatacatatagaaaatagctatttatatcggaactaggagaaattcctgcaattctctgatttaaactgtatttattatcactatctatcaagtaggcctttgctagagcttttccgttcggtacatcagataaaacaaaagcgatctcacctttttttaagagttcgattggctcatttgaaaatttctttactttaccatttgttgaaatgaattttgaatttacaacagtatagattccattcatatcaatatattgctcatgagcttttccgtttctataatttgcaatatcacttaatttgcgctcttcccaatcaccattaaagtttttaaatcttaaaattggatgtttactatttttttcaacaaataattgttgtaacagcgccttttttagctgtttaagttgttccaattttcgttgctggagatcaattaatttttgaatagttagtattaaatcgctaatcttgttttgttcgttctccgagggggtataaattatatatttttgatattcttttgcattgattccaggctgcccagatctcatagaagttacttgaacaaaataatgatatcgaggtagaagtgttgtatcaaaaataaaattagtagaaaagtggtctttaatgtgagctttgattaaaaaaccagcatagtacactttaccgtcgatattactgtacctgtaacttttaccaacactagcaccagttcgtgcaaatagaatatcaccattggctaaaagataattatcatcttttaatttaggagaagttaaatgtgatatatcgaatttatgagatacatcgtcaatgtcagtaatacgcaaatacttatttataccatcgtagtcagttgcaggtgtattaagaccatattcaaacccagtaagagtctcccccaacttacgctgctcccatttaacattaatacatacttttataaaaattattgataatactgagaaatagctggtaaaaagttacgatataataagtatttagaatatatatttaatgggtgaaatcatggcagaatataagagaagatcagtagaaaaagcaattattatggcattaagagatttgggtgggtcagcaagccgaaaatctatttggaaagcaattgcagataatgaatatgatggattaacttatgatcaagtctattcaactaaagaaggtaaaacgggcacttattcaccattcttgtttgactttaactttggtattcgaaatttgcgcagtattcaatatattgaagctcctcatcgtaatcaggatattgttcttactaaggccggagagaacgatgatttaacaaattatccttcgttagaacagaaaaaagaaattggtgcttattgggataagaaaaataaggaacgtgctgaacgtaataaaaataaagtaagtgaagaaagcggagacgaatcaacaggaccagaagaccaagaggatactaaagatttaaactggaaaaaccaattgattactcaattaatgaagtttgatcctagtaaatttgaaagtttttcgcgcttattgatttcaaaaatgggtgttgtaattgataaagatcgcggaattgttcgttccggtgaccatggaatcgatggctttggatattttacatctgatgaattcagaactagtcgggtagcgattcaatgtaaaaggtacacaaaaggagcagtatcagaacctgaaatcgataagtttaaaggagtaatggatagttttaatgctgaatatgggatatttatcacaactaatcatttcacagatcgtgctcgaaaaaaggcaacccaaggaaataatactgtaacattaattgacgggcagacactagctgaattggttgaaaaatatcaattacatattacgccagttaatacgtatgctttggatgattattacttcgatttgaagtgaattttaggagctgaaaatgattgactatacaacgttaaaacatcaagccgatggtactccgacttgggatgcatttttaggagttattttaaaagttgccgttgaaagacagaattggcaaagcagtgaattgatacaaagaactttagaagaagctaatttaccgcaaagcatgttgcaaatgcgttatgttaacaccggttctaaaatgtaggaaaacaccgatttgaaaatgtcgattttcctacaattttttatactaattgcattaaatcttttgaggtgatttgatgcgactagaattacaagaggagttaatattttacaaaatggcaaaaattaaacctaattatgcggccctaggccgtcaatataattgcgaccctaggacaattaagcggtatttaaataatccacaagccggtaaacgacaaactaacaagcgttgcccaagtaagttggacccataccgtgatgttatcaaggataaatacaaaacctgttctgcaacagccattttctatttcattaaagaattaggctacgaaggcggaatttcaattttgcgtgattactgtcaccagttgaaaaaagcacaataccagcagccagtgattagagttgaaactgcacctggtgatgtaagtcaggttgattggaaagaagacttagtcttatataccagagaaaaccgccccattactttttcactatttctgtatgtattgggttattcacgcaaaaaattcttaaagttagtttttgaccgtaaacaagacacactatttcaatgtttgattgaggcttttcaaaatactggcggtgttcctcaaagaatttatttcgataatatgaaaacggcggttgatcacgccaagagtagctatcgaaaagttatttggaattcacgcttattgaatttctctaaagccgcaggctttattccccaagcctgtcggcccttccgtccccaaaccaaaggaaaagtcgaagccttagcgagaaccgtagaccgtattaaagtttataatcacgaatttcaggatgagaaggcgttaaaaaatatcgtgaagcagcttgaaacacagctcaatcacgaaataagctaagcaactgatcaaagaccagaagatttatggataaaagaaaaagaatatttacagccatacaatccaatccttttgaattcattagttgatcacgatctaacccgcaaagttagtaatgaatcgatgatcacctatctaggcaataaatattctgtacctgtaaagtatatcgggcaaacagttaacgtcaaggttacagaccaaaaattaatgatttatcatgcctcacgattggttcgacaacattacctgagtaataaaaaactaaattatcatcgcgatgatatgaaggaaatccttgggacaactatttttcatgacttagatgacgataaattggcagaacaggtagaaataaatttacgcatgtttgatcaattatagtggaggaatgacggatgactatctatacacaattagaagacaatttagaaaagctcaagctgactgcaatcaaagaatatttgccaaattacttgaataataatgatttatcattagcagaagctctagaacagctaactgcaaaagaaatcacatatcgaactgaacgatcagctaaaatgtccattcatattgcacactttccttacgacaaaggcttgaatgattttgactttaactttcaaccttcggttgataaaaaccgtatcatgaacttaaaatcgatgaattttgtttcgttagcacaaaatatcttattcatcgggtcttcaggagttggcaaaacgcacttagcaactggattaggaatggaggcctgtaggaatcatctcagtacttattttgtcaattgtcatgaactaattgaacggctcaaacttgcccaccaagaaaatcgtcttgaggcaatattaaaaaactacagtcgttataagcttttgattattgatgaaataggctatctacctattgacgatttgggatcagatcttttcttccagttaatagctcgtcgatatgaaaagaaatcaacaatcattaccactaatattccactatccaagtggggtcaaacattctctaatccaacaattgcgaatgcgatcttagatcgcttagttcaccattctgaaatattcaaaattactggaaaatcatatcgaatgaaagactatcaagaacaacagacaacagaaacaaatcggtgaaaaactacatttttaaaccggtgaaatcctacattttaaaatcggtgttgacatgcgttatccacaaaagagtcatgatttggtcatgcgtaatcgagttagttttgctttaagtgatttagcaatttcaggtttattaaaccgacccaagagaggcctttatctcccgactcgtcgcgggcaagagcttagtaaagaatatggaattaatataacgagaactttgatccataatgagccagcttataagaaatacaaacaagaaaaaagtaatcaaaagaaaaatagacagaagcgagaaaataaagatttagctgaaagtcaagttaaggaatggtttaatcagcaagacgaaaaaacgcaggatgaattattaaatcacttggtaaaaatgaatccatataaatttgaaaacttaatggttcagttgttatctgtaatggggtacaagggtgatgaagggcaggctttagtaacacagaaatcaaatgatcatggaattgatggaattattaatcaagacccactaggtttgcaaaaagtttatcttcaagtaaaaagatatgcgccagataattcagttcaaatgccagaaattacagcatttagtggttcaattaagctcaagcatgcagatagaggtgtatttattacaacttctacatttactcaaggtgcaatcaacgcagcaaaggacttaaatattacactggttaacggcgagatgttaactaatttaatgattcagtatcaagttggagtagaagtaaaagaacattatatgacatataaaattgatggtaatatgttttaagatactaaatcttctttaaatctgaaatcgcttccttaaattatcgcccaaatgcgttataattaacttaactgatcaacaaagaggcgattaaatatgaagtgtccatgtcataacttgtcaaagaaccaaaagattgttttattaacacttgtcgcaggagccttaatttggccaatgtacttactatataagctggcaaagaagaactaatttttatccgaagaatcacttgcgagtggttctttttttcatgatataatttgaaagttaactaaaaaggaggcgagtcacatgttagatatcctagattacactaaacaagaattgatttctgatgccgatttttggcaattcgcgggtgagcatcttgaaaagccaaccgaatttaggggcgtttcatttgtttcttcaattaagtttattgaggagcaactattaccgcgctatgataaggtcactttgatcctcggcttaagcgacaatgggaaagaatcaattggcaaacggatgaggcagttaaatgaccggactgaatttgtcaattatggttatgaacaccctgatagtgaatttacgaagcgaattttagatggtagcttgcaacttttattcactaagcaagaattaattcataccaaaatgtacttaatgacaagtgacgaccggtatctttcatttgccggttcgatgaatttaaccgaagcagcaattcatcataatttagaacaacttgacagtgactatggaatgcagacggatccgctttatcaatgccatgtccagatgttcaacgataaccttcgccatgcgactacctatctggacgcaaagaaaatggccgggttcattaaggcgaaaaataaagagcagcttcagattaatgtctataccgatacggtgaatatggtgaaaaacaaggataccggtgacaaggatgcggtgattatcccggcagaagaagtaaaagaatataaggatcagtatagttctgacgaggaattaaagaaactatcagctccagaaaaattgagtgtcgcccaaactgtcaagctctttggtaatgctggctataagaaacgcaatctcgaaaatatagggaaagaactctacagccttacccaggtagttaaacatgtgtctcgaaacgatgataactcaggaaaggttacccgtgaagaagacctctaccctaaaccagtcttgttttataacaatggtcagttatttgaagcgccccgtgttggtgataatgtaaagtcagaattaataacatcgaatttaacgggtgaccggctccgtgaacagctgcaattatttagtgatattgcccatgagtacgataattacaaagaagtcggtgaggggtggcaggcatgtgatttcatgtgtttcctatttgaggcgccttggctatggaaaatccggaatatgtatgaattatcgccaagtagtaaatcgcgcgaagatgtaccccttggagtagccttgattggtcaaggacgaacagggaagtcgaccttgggaaagcggctagcagccaagctaacggggagtggcaatttccttgatggcggtgtttttgatgctaaaaattatgcattaggaaagtccaatatcaatatgactattacaaccgtcttaagcgattatatgtatagtgccgggcccgttaatccaatgatgattgatgatattagccccgacttaacaacacggccatattttgatcgcttcattaaagaaattactaacaatcgtagtttaactcagccactcccatcatttatttttacgatgaatcgtcgtgagggtgatagtaaatcgcaattttcccttaaaccggaaattatgcgtcgtttatggtacctcagctttgaatcaacttttgccggggatgaggatgaacgtgaagctaaattaaatgacttgcttgagcgcgctaacgatcagctttatcgttattgccaagttgaactcgcaaaattcttcaatgatgtgtcaccagagacagaacaaaagattgagaaggattacctttatcccatcaaatatgtcttgaaacaagcgatggaccaatttgggatgtttgagcttgttaaagactactttgatgataattatgattactcactctttgtcgggcgaaatgattggacaatgctgattaaccaggcggaagtgggtgctgatctaacgtttattcagcaggatggtcagttaaaagcgcaaattaataagcagctttttaataaggtttcagatagtacggcgcgaaataatggttcaatgatgatggaacggtacttccaatacttgccgcgaaagtatcggattagttatcaatatactagtaccggttttattgtcgatgttgctaattttgatcggtggcttaacagtgatacccttcagcaaaagtataatagcagcgaggtagctcgggacgctcaaaaggtaaatactgatgcaaaggtgactgaattgcttacccggttaacagaggcacaagaaaagcaagcgcaccgccatgggatatttagctggcttaaaaagaaataaggtgaacctatgaaacatatttggaaacttaacctatttcaaaagataattgtttggttatttataattgctttaattacctggcccatatatttttacgtaaaggcaaaatggggctaaaataagagtgtaggtagtgataggtttttgaacaaaggagtagattcttatgaagaaaaataaaactacacaacctaagaagcattcaaagaagaagtttactattttagcccttttagctggcgcgattgctttaccaatttatttagtaaagaaagcgtaaaattataacttatattgaaaaggatcacgattaggtggtccttttattatgtctttttaaattttattgatcgacattaaacagaataatgttcatttgttataattaatgtaaccgctatactaacaattcacaaagaaaggatgccgataacaaatgaccaaaaagataatccttgactgcgatcccggacatgatgatgcattggcgttaacgatggccattgcttcaccgaagattgatgtccttgccgtaacaacttctgctggtaaccaaacaccggacaaaaccttaaataatgcgatgcggatgttaactttactccatcgtgaagatattccagttgctcaggggaatcaaactccgctggttgagccgcttgaaactgcaccagaagttcatggtgagacgggtttagatggtgcggaccttcctgatcccgatttcaaagttcaaccaattccggctattgaattgatcgctaaaactcttcgtaaaagtgatgagaaagtcactctagttgtcaccggtccaatgacaaatgcagccttattcttgcgagtctatcccgacttggcaaaagaaaagattgatcaaattgtcttcatgggtggggcaatgggacttggcaattggcgaccatcagttgaatttaatatttttgttgatccagaagcagctaagattgtaatgaacttcggcctgcctctggtaatggcaccgttgaacgtgacccataaagcgcagattatgaaagatgagattgagcaaattgggcagatcgataatcctgtcgctcaagccttctacggtctcctaaacttctttgaacagtaccatgaaaatccaaaatggggttttaaaggtgcacccctccatgacccatgtacgattgcttggttgattgatcctactatgttcggtactgacaaaatgaatgtggatgttgaaactcagggcgatcttacacggggagagacggtttgtgactactatcagttaactgataagccccaaaatactaaagtcctccttgatattgatcgtgagaaattcatccaattgatcatggataccctgcaaagtttctcacagaaataaatttgctgtttacaaaaagaaagtgaagagttacactatatgtaaatttaacaatctaattttcttcggggcagggtgaaattcccaaccgacggtaacaagtacgcttggagtccgtgacccgttagcatttatgttaacggttgaaccagtgaaaatctggtaccgacagtatagtctggatgggagaagaaaactaaaaatgacacaatcagtttaaacgtaaagccccggatagcagtgatgttatccggttttatttttaccgagctgttttttaagttaactatttaacgtcccgagagaaatcttagggcgtttttattttggaaaggatggttagagtggaagatgtttatttcatgcaaatggcaatcgctgaagcagcaaaggctggcaatgaaacttggaaaaatcctcgcgttggggcagttgttgtgaaaaatggtcaagttttagcgcgaggtcatactcacgaatacggtggaattcacgctgaacgggatgcaataggtaaacttacgccgaaacagttacagggagcaactctttatgtcacgttggaaccctgcaatcactatgggaaacaaccaccatgtagtcaggcgattattgacgcgggtatcaggagggttgtgatcgcggaaacagacccgcaccagcttgtcaccgggaaagggattactacgcttcaacagcaaaatattactgtcaaaacgggcgtccttaaggaagcagcacaggtcttaaatccgcattacgatttcttctatcggtaccgacgaccatgggtaactttaaaacaagcagtgagtcttgactatcgcgtggccgcagaaaaaggtcaacgaacggcgattactaattctgctgtggcaaaaatggttcataccgagcgtggtaattttcaaggaatcttgattggaagccaaaccgcaattatcgataatccaactttattaacgactagtccgacaaagtttccgccagtaaggattgttcttgaccgccggggacgtttaaaagataatccaaccttacacttgttgactgaagggcaggcacctacttggatttttacggaaaatagttcgctacaagatcagtttgctaaaggcattcgggtgttttatcgccggacgtggtcaattaacgacatcttgcatgaacttggttgtcgagaaattcaatctgtttatgtggaagggggtccgactgtccatcaagcctttttacaggaaggcttatttgaagagcttattacatacgtagctccccacatgcttggcaaaaaaggtgttagcggcatggaactagcttgcccaatgaattttacccatcaggaaattaaaatcttagaaaataatattaggattgcggaaaggaagattgaaaatgtttagtggtttagttgcggaaacgggacgaatagtaaaaattacccaagatggcgaaacgattgaattggtggttgaacctcatagtgatgattttttaaccaccgtgcaacttggcgattcaattgcggtaaatgggacatgtttaacggtcgtagaaatcaacaacaatcaatttacgacgacattaatgtcacaaacctttgaaaagacaacgttcaaaaacttggaaaaagggtccctggtaaatcttgaacgttcattgcaaatcggcgcacggctagaaggtcatattgtaacggggcatgttgacgaactatcacgagttttaaagcggactgtcaatgaaaatgctattgaagtgcaatttagtcttccgcaacgcctgcatggtcaagtggtagcgcaaggaagtgtcgcgattaatggcgtaagtttaacagtgatggaaactggtgatgactggtttacggttgggctgattccgcacactcaactcgtgactaacttagatacgcttaaagtaggggatgaagttaatctagaaaccgatattttaggcaaatatgtagtcgcaaatttactaggaggccgaaaataatggatgtaaagaaaattcaagcaacgattaagcatttgcaagaagggggtttagcaattgtcatggatgatgcagaccgcgaagcagaaggcgatttggtggggcttgctagtgaagctactcccgaaaaggttaatttcatgactaagtatgcccgtggattgatgtgtgttcccatggcaccggaagtagctgaacgattgaaattacctcagatgactgctgataattcagatccttttggtacggcttttacgatcagcgttgaccatcattcgacaacaacgggaatttcagcttttgatcgttggcgcactattactcatcttgccgcaccgactgctaaaaacgaagacttctacaaaccaggtcatatctttcctttagttgcaaagaaaaatggagtattagaacgaaatggacatactgaagctgctgttgaccttgcgcgcttagctggggtggaaccagttgcttatatctgtgagattttaaaagacaatggtgaaatggcacgatcagttgaactccatgagaaagcagccgaatttagcttacccatcattacgatcaaagaacttcaggaataccggcaaagtctagcgagcaaaccagtagcagaggtgcacctcccgtctcagtatggtgactttcgcttacggtggtttgatggcaataatctagcgctaataaagggagatattgatccaactactcctgtaatggttcgcttgcattcagaatgctttactggcgatgttcttggttcccttcgctgtgattgtggtcctcaacttcatgaagcaatgcgccgaattgagaaaaacggcaacggggttattatttatttgcgtcaagaaggtcgtggaattggtttagcaaataagttgcgagcttactatttacaagagcacgactatgatactgtcgaagccaatgaaaaattaggttttgcgcctgatgaacggcagtatgaccaagcagttgcgattttacatcaattagggataaccaagattaacctacttactaataatcccgataaaattgcgcaattacaacttggcgatattgaaatcaatgaacggataccattagaaatcgcacctaataactacgatgagaattacttaatcacaaagaaaaataaatttcatcacttactgaatctggaggcttaatcatgaaagaatttactggaaaatttaatgttcaaagtgcaaaaatcgggattgttgttgctgattttaacgaaactgtcactaaacaattagtgcagggagctaccgaaatgttagctaagtttgaccttgaaaacgttgatgtataccatgtgccgggagcatttgaaattccgtttatgacaaaacaattattgacaaaaaaggaatatgacggcattttgacgttaggcgctattatcaaaggtgaaacagatcactacgatttaatttgtcaaaatgttgctggcggcgtaatgaatcttaacttaacgagcaatattccaattacatttggcatccttactaccgataacattgaacaggcaatgcaacgcgcgggactcaaagcgggtaatgaaggagcgatcactgcacaaagcttactagagatgatttcgttaaatcgacaaataaattaaaaataacctccattcttggataaatccttgaatggaggttatttgctaacgtttatttttcttaatcaaacgcttgatttcgtctagctcagcctttagttggcgattttcatgttgaattttgactaattgtgcagaaatcttccgttcgtcttttttggcaaagaactcagtaatcgtactggtaagcatcccaataaaaccaattcccaagagcatcaagacaatcgcggctgcccggccaattccggtcttaggaatcacatccccgtaaccaatcgtagtagcagttgtaattgcccaccacagggctgtttcgtaagagactttctccgagatgcaaaacattgcagcggctaccattataacagcaatcgtaatgtacaagtagtagagcaactcattgcgctcaaagaagacgcctaaacgaccggtaaatccgactaaacgcataatgcgcatgagtttaagcatctgaaaggttctaccaatttgtccaattcggaagagaaagaagaggctgctggcaggaatgattgatagaaggtcaaagatgttatctttaacaaattcgcgtttatttggtgaaataatcaggcggataacgtaatcagtaaagaaggccaaccaaatcccattgtcaatcatattgtaagggtaggcatcaatattgatccgcttagcataatatgcgatcagcattccaatcgagataacggctaagatagccataataatttggtagacaatataggtaaacttcttatgcacgattttttctcctgcccatagatttaattttatcttaagcgtctcttaaaagggatgcaagaattattctgctttacttgcgcttccgttcccatacgatcgtaatgattccggtaagaatggtccagcctaggccaatcaagctgagtaatacgcctaatttgattcctggcaactcatagctaaaggtaacatgatgagttccggcaggtaagtatactcctaggaaagcctggtttgttcgtaaggtagttgtctttttcccattaactttcactgaccaaccagtagaataaggaatcgaagaggtgaggacgccaggacgagtagttttaatcgttccctgaacttggttgcgtttgaatttaacgtcctctagacgatggcgttgcaatgttttaacttcacgataataattattatctagtttttctgctactacccggtatttgagcttataagttcccagctttgaaggctggaaggtgagtgaagttggcagtttgccatcataataaccaatattaagcgtcgaattagtaacgtgtttaaataaagaaagggtactttgccgcgcctgttcaatcgtagcagttccaaacttactgccgacattaagcttaaagctaatatcaggtgaaccatttaaaacgtggtaacgccaatagcgatagtgggtatagcgctgattaataacatttccgggattaaggaccgtttccttcagatgtgcttgctcataggcaatctgttctttcatggagaaaggagtgtacttaatcttagaaaattcaatatgcaactcgctgccctttaatttttgctgcatttttttactttgcagttctgataattgcaattgataagtttcttcactatcggtataggtcagcttagccgggttaaccttattcaagcggttagaaactaactcgcttttaaggggatagacatgcgtcttgagattagcggccttcattcctcgaagcttttcttgcttatcaaccagaacaccggtagctaaaacgcgttctttttcagttggtgagagtgattgataatcttttttactaatgtaattatcttgccagtaaagtaatgggaaagcatagttcgttttgtaccgcattgtttgcgtgggcacaaactcatctttgcttttgggattgcttggctgtccttcatcataattgatgactggatcagttgctttatctaaaaagtaaccagcgggaatctttgtcgcgttatcaccattgctttgaacaaagagatatttgacgccaaagaaattgttcataattgtccgatcatcggcttgccgaatggggatattagcctgatactggttattttgtaggcttgtattaaactgtcccaaatatttattttgcagtgaatagtaagaatcaatgttatgcaatccagaagtaaggtcgttatcaaggttcgggccgtcaataatcttattttggctaattgttgaaacgcggtaaaaagaattattcttcaaatcctgatcaaggttaccgtaacggttgctagtaattgcttgatactctccccggctcagcatactactagagaaatctccgttataggggaaagccgcgtaaattgcgttcaccccagcgttaagcattgtaatcgctagtaaccaccggtaaggatgagtaagtttatttaagtgaatcaaccagatgaccattagggagccaattaagaaaataaccggcataaaaatatcattctcattgtcaaagaagaaggttgcaatcaagacaatgaggtaaatccctgttgcccaacttaggaccgccattgtcttttgatcaagcgttggaatgttctctgctagaatacagacggccattgctaatggaaggtagatcaagagcgtccaacggttagaagctgacatcattccgttgaagaaagcgccgactgctggaattagcagcatgattaaggaaagaccaaggctaatcgttagcaggggatactttcggggacgagaataaatgtaaacaagggcgataaaaccaattgaaacaatccctagcgcagaccagaacatgaaataccattgaccaccgttaatcagtgacttaggcaaaaagagatagtagtaaagaggataggtttttaaaccattagcaaataatgatccagtccgggttgaatttgtgaccgcgataatttctgggacgagcaagaccgcggataagaggacactagtaattgtcgcaaaggcaagtttaagcaaggctttcccataattaagcgtgcgacgataatgcgttcctacgcgaaggacaagatagagaaatgaaccaattcctaaaacgtaagcaaggtaatagttgcttactagcatccatgtaaaggcaccagcaagcggccagggcgagccttcttgcaatatccgttcaatctggaccacgattaaaggaaagataataaatggcgtggtaaagaacggctgggcgatacaggcatagagtaaaaacgaattgaccaggtaggttgttgcccccatcaaaatgacgctattccgaaatttaaagtgttgcgcgaagtagacaaaagcgaggccaacacaatacatccggataatattaattacctggtaggcgagggtaatctttgctgcgggaaaaagtagtacaaggtaagagaaaacgtctccaatcgtatagtaagaatatacttgaaaggtatcactgcctagccccatttgccatgaccagaagtttaggcgaggatggtggaagaagctaatcagtgcttctcgatactttgctagtaaaggtaaatgctgattgagagcatctttgctaaggataaaagtatgaccagtaattaagtatgtcccgaaaatacataaggctaaaaagatgaataaaatagtatattcaccatatagtctttttaccggtcgttttttaaatgagaaatccataattcctccttggattaacaatcattttttaggatatctctaatattttaacaaaaaaatattaagagtgacgttcttaattttagcggatattcttaggatttgggtggtaagttctaaaatgatcaattacaataaaaaagatctttatattaaaggggtaattttatggaaaatataggtaactttacagtagcaaaacgatggggatcttttctgctactatatttaggatatatgattttatttgctgaccgcacagtgatgaatatttcccttgcttacatcggtaaagactttcatgttggggcggcagcgttaggggcaaccgccagtgcgttcttcttagggtatactttgatgcagatacctggaggatacttaactgataagtttggcagtaaactgatggtaattatttccttgtttgcctggtcgttgatgacaatggtgactggctgggcgtggtcccttgctgccttgattgcgattcggtttctgtttgggattgcagaagggccatatccagcagcggcattaaaacgaatttctgaaaattatgataagagtgagaaatcacaagcaacttctgctttaatttcatcgaattatgccggggcagcagtagcgccactaattattgtgccaattattgctagcagtggttggcgaaatgcctttgttttgcttggggttggtgggtttattattttacttacctattacctggtagaacggccaattaatagcagccaagaaaatgggcaggcgcgttccaagattgaatggaaaaagattgaccaccgtgtctgggcctttgtagtaattggacttgcgctgaatatcattactaagggacttgaaacctggatgccagtttatttcttgcaagaacagggaattaacttgaagaacttggcctggttagtaccactgccagttatttctggaggtattgcagcatttatttctggctttgtgatggtgcatttgtttaagaagcatgaacggaggatgattagtattgcttcattcctgactctggttttcatgtttggtctctttaagtcaacttcattagtaggcgttgtgatctttgatgtcttgatctatttcgttaaatcattggcatttaccggtatctttagtttcattgcacagattttatcggagaaaacttatggatcatcaattgggattgttaactttggtgggcaactcggtggttttgttggtccactcttaattgggtggattgtccaagcagccggctcatattcagctgctttcttcggccttgttatcagtgcattagttgcagtgattgcatgtttgtttattaggaaagcataaaaaataaggtgttgggagaaaataaaaagctttctctcagcaccttatttttgctttataagtccttacttcattaatacttttaatagcttgccgtggcaacgatgcaaggcactttggacgctccgtttagagcaatcaagggtaccagcaatctcagttatcgaataaccagtatggagataaactaatacttttcgttcaaatgtagaacagcggcaaagtaaacggtcaagactctgccggcaataaataatgtcatcaggggaatgatgtaaaaagtcggtaagtgtttcagcaaaatcatcgcttaatgcgtaaagacagcctgctgggatccgtttgtgagcctgagtttgtcgttgaatatcacgaatccggttagttaagcattccttaaaaaagcagctaaacatgcgcggaccttgattattgtataaacgaataacttctagcatcacaacacgggcttcctgttcccaatctgccaattcaaggccgctaatattatatcgttgccacagtcggcgaacgagcggccaataacggcgaaataactcttcgaagtctttattgcttccgcgacgggtattgttaatcagcttaaggtacttttcttcatctttttcattgaagcgcatatcaaaaatgctctcctttaaaactataatttacgcgacatgcttcccatcatagtgtttgtcctatttatttttcttctccccaaataggtaaactgacgacctaaaagaagggattcattccttaattcaggcaagataaaacggtttaattttatcacgcagttcgcctcgcgttggtattaatttatcaaatgtcttattttagaacaataacggaatttgtataatcagaacgattaatcgaacgttaaggcgagaaaagatagtagtaaagatgaataaccattttttataattctaaataattttattttcgaataataattaaagaaatgatcagaagattaagaccggggttgattgatcaaagtaactatactggtactagtacattgatcattgcaatggatatcgacttgccaggtttggattcgccggccacgtttaatcggaattgcaattgctcttaatttaccattcgataccgcaatgaggtgctctgtggtaatattaacaccgagagctatttgatcttgttgacgatcagctaaccattgattggcacctaaggaagctgcggtttcagcgaggactgaatttattccaccatgaacgattccataaggttgcttgagcttatcacttactttaacagtgataacgcacttgttggctgtgactgattgagtttgaatatctaaattttctaataggttcattattattgacctcacaaaaggagtagagtagttatgacaacagttgattggcaaccggttaaagattattctgaaattatttttgaacgagcgggaaagattgcaaaaattacaatgaatcgtccagaaaagatgaacgcctttacccccgttacaattcaagaaatgatcgacgcgtttaccatctgtcgtgatgatagcacaattggggtgattatcctaactggtgctggtgataaggctttctcatctggtggtgaccaaggagttcgtggtaatggtggatacgttggtccagataagattgcccgtctcaatgtccttgatttgcagcatttaatccggattatccctaaaccagtcattgcgatggtaaaaggttggtcagttggtggcggaaatatcttgcaacttgtttgtgatttaacgattgctgctgacaatgctaaatttggtcaaactggtcctaaggtcggaagttttgatgctggctatggatctggttatcttgcccgcgtaattggtcataaacgggcaaaggaagtctggttcttaaatcacttctatagtgccgatgaagcctaccagatgaactggattaataaagttgtgccattagaccaagttgaatcggttaccttggactggtgtaacgaaatcttgaagaagtcaccaacggcattacggtttattaaggctgccatgaatgctgatactgatggactggctggcctccaacagctcggtggtgatgcgacgatgctcttctacaccactgatgaaggtaaagaagggcgggatgcctttaacgaaaaacgggaccctaattttgaccagttccctaaattcccataaataaaagaggcaatttaaatggaaacacaaaactggctattaaagcaagcagcaactcagccgaaccagattgcgattgacgatggtaatgaacgcctatcatttgctgaattaaaaaaacaggtagaggtacttgttggaaaaattgaccatcttaatcctggttcgcgggtaggcatcctagctactaatactctgatgagctataaattatcactagcgatcatgtgtagtggccgcacgattgtctggttgaacttgcggcttgctggtgaagagcttgaacgacagattaaagatagtggacttcagttgtgtttggttgaaaattctctctggcgatcagggatgacggatccttttaagtcttacagtgcgttcttgataacaagtgctgatccaggagagctaattccagtatttaaatcaaactgggtagccagcattatgtatacttctgggacgactggtaggcctaaaggagttttgcaaacttttggcaaccatttttattcagcagtctcttctgcattgaatttaggtttatcatccgcagataagtggttgtgtgtagcgccgatctttcatattagtggtttttcgattattatgcggggattaatttacgggatgactgttcgcttggttgagaagttccgtgctgaagaacttgaacgaattttagcaaatgaaacggtcaccattatgtcggttgtgccttttatgctgaaaaagctcattcagcagcaaaataagactaatacgcactataattcagcatttcgttgtatgttacttgggggcggaacgattgatcgagaaacgctcgaagcatgtttgcaacggtcaattcctgttgttcaatgctatggaatgacggaaacatgttcccaaattgttgcattacggtcagctgatgcactcctaaaattaggatcagttgggcagccactattctcaacccaactaaaacttagtaaagatggtgaaattctgctgaaaacaccagctttaactccgggctatcttaacctgcctgataagttgccttctaaaatgattgacgggtggtaccggacaggagatatcggtcacctggacaaagaaggatatctctatatcgatggtcgcgcagatgaaatgttgatctctggtggagaaaatattttcccccaagaagttgagcagatctaccaacgttacccacagattaatgaagttgcagtcgttggtcaaaatgattctgtctggggccaagtaccagttgcctttgtcgtcagtgatcgtcgtctttctccaactaagctaataaattatggttatgaacatctggcgcgatataaagttcctcaacactatatttttgtttcagaattgccaaaaaacgcgagtggtaagattcgccggtttatgttacgagaaaaattgaataatgagtaaaaaaacgaggctgggagaaaacttttgttttctctcagcctcgttttcacgaacaatagcaagataacgtggaaactaaccacacgtctccatattttataattactttttattctttgccagctttttaatttcacaatcgtagtcacaagctgcacatttcccttgcttgcctcgttgaaaagtcttaacaaggaggtaaaaggctaacgcaataattgcagcaataataataacgttaataattaatttcattttaaatcacccaataaataatcgaccaacctgaaagataataaatgcaagcccgtacgcaacgactaaactggatgcaacagaataaagcatccactttgtagaaccagtttcttgtttgatagttgctaacgttgcgaaacatggtgcatataagagaataaagactaataacgtataagcagaaagcggagtcataaactgaccaagtgaagcgatgaggaatgctttactgcttgtatggaacattaccatcatactagaagtaataacctctttggcaaggatccctgtaaacaaagcactaattggctgccactggtcaataccaattggcttaaagatcggaacaaggatgtgtccaaggtcggcagcaaaactattagccgaattagtaacaaaaccactaggaccaaaacttgataatatccagattaaaacagttccagcaaaaataattgtcccagcctttttaataaatcctttacccttatcccatgttccgtgccaaattatatcaagacggggaagatgatagtgaggaagttcaactacaaacactgagctttcttttaccttaaagattacttgatagaattttgccattgctaaagccacgacaattcctaagaagtagactgataaaacaatcagtgcttggtgacgtgggaagaaggcggcaacgaataagctataaatcggtaggcgggctgaacaactcataaacggcatgattaaggtagtgatcagtcgttctttaggctgttcaattgttcgcgcagccatgattcccgtaacgttacaaccaaaaccaataattaatggaataaaagacttaccatttaaaccaatcatctgcataacccggtccgttactaacgctgcccgcgccatataaccagagtcctcaagcagggaaatgcaggcaaagagcatgaagatttgtggaataaaggctaaaactccaccaaccccggcaataatgccgttaacgactaacgaccgtaatgcaggaattgcccctagactagcgagggtttggtcggtagtagttgaaactgggcctgatataaactgatcaagcatatcggaaagtggggtgccaacccaatcaaaggacatcttaaacattacaaagaaaattaggacgaaaattggtaagccaagaatcgggttggtaacgattttgtcgattcgacttgttatctcaacttgcccaccattgttaagtggatgacgggcctggttgagagtgtcctcaataaactgtagccggacttcaaaaatttggtcagcgaacttttgcgcgtcataatatttttgttgcgaaagaaggggagttagctctttttcccgggcaaatttacgaattactttattcttacttatgaattgaatcgctaaccaacgcgcaacctggggcgcaaaagaataatcactttccaacgctgtacttgcctgcctgattgcttgcttgatcatcgggggataatctaaatctagttgggtagggtggagcgaattacaattgatagtttcttttcgtaattgatcaatcccttgatgtccacgcgcatttgttgtcattactttacaacccagccttttttcaagcaggtcaagatcatagtcgtaccctgatcgacggagatcatcaatcatgttaagaaccaatacaacaggatagccgagttccaatacctcgattgttagcaaaaggtttcgttttaactgactagcattcgtaatatttaagaccatattaggttggttatgcattaagtagttagttaccactgcttcgtcttttgtcaaaggatcgagtgaatatacgccaggtaaatcgatgataataatatctgttcccttaagcgttccttgtttcttttcaactgtgactcctgtccaattaccgacataggcgtatttatcagtgagcgagttaaacagggtagttttaccagtattagggtttccaatcagtgcaactgttgtcattttattctgcccccgtaagcatcgtaaaaacagtgtaccgcaaaccaattcgttggtgatcattttcgattatcactgggccatgaaaaggatatttttgaactactttaatcggacacccttcacacaagcccatatcatgtaatcgggcggcagtggctgtatttaaacagtcaaatgagtgaagaatataattttgttgaatcattatcgccacctgccttatcaaatattctaaaattatataaacactatattatatctttattatacactcaaattattcatcgagaaaacgcttaaaataaattgagatgaatagttttatttttttattattcggatataataagaatgtaaagaatttgttgatatttatggaatatttaccgagaatattttggaatatttcgggtcaggaggatgaattttatggcaacactagaaataaaggatcttcacgtttcagttaaagatgaagaaagcaaagaagaaaaggagatccttaaaggggttaaccttaagatgaagactggagaaatccatgcaattatgggaccaaatggaactggtaagtctactctttctcaaaccatcatgggtcatcctaactatcatgttacaaaaggcgatatccttcttgatggggagagtattgttgatatgccggtcgatgaacgagcacgaaaaggtctctttcttgcaatgcaatatcccgctgaaattcaaggggttactaatgctgagtttcttcgggctgcgatcaatgctcgtcgtcctgaagatgatcaaatttcggtaatggactttattaagaaactcgataagaacctggaattgcttgatatgagtcaatccatgactgaacgttatcttaatgaaggattctctggtggtgaaaagaagcggaatgagattttgcagcttttaatgattgaacctagttttgcgattcttgatgagattgactctggacttgatattgatgcccttaaggtggtttcaaagggtgttaattcaatgcggggcgacaactttggttcattaattattacccactatcaacgtcttttgaactacatcgttcctgatacagttcacgtaatgatgggtggtcgaattgttaaaactggtggtcctgatcttgccaagaaacttgaagatgaaggttacgctggcttacgtgacgaattaggtcttgatatcaaacttgtagatgatgaagactaggaggcagtttgatgacagaattaaactcagcaaaagaacaaataattgctgctagtaaagcaaataatgaacctcagcaattgattgatcgccggcttagtgctcgggagttaatggaaaagcttcgtttgccacggatgcaacggttcgattttcgaacttggccccttattgcggagcggccattgaaatgggttgaagcagacgccgacttagttgaaaaaccagtcaccgatgatgaagtaattaaggtaactcagtttgggcaaactttgctccacgttaacttgccacaaaaacttcaagatcagggggttattctcacagatatctttactgctgcgcgcgaatatcctgaacttttcaataagtacttcatgactgctattaaccccgaagaaaacctattaactgcttatcatcttgcctaccttaatgccggtttattcctctatattccaaaaaacgttgaaattgaaaagccaattgaggctgagattattcaggacagtactcaagatgagcctctaatttcgcatattctagtaattgccgatcgtggcagccgcattaagtttatccaacaccttacaactgttggtgatcatgaaaatgccgctaatatgatgattgaattaatggcgcaggaaaatagtgagattgatttttcttccttagatgaatttggtccccatacccatacttactttaagcggcgtgccgatattggcaaggatgcgcacgttgaatgggcagtcggcttgatgaacgatggtgccacagttggtgatatggattccgaattgctaggtgatgggggttatgctaactcaaagatgattgccgtaactactcgtgaccaagaagttggcgtcaacaaccgcgttactaatcatggcaagcatactaccggattgataaaccagcgaggtgttattcttgaaaagtctgaattgatttttaatggaattgggcaaattattcatggtgctcatggtgcaaaggctgatcaacaaaaccgggtattgattatgtccgatcaagcacgaggagatgctaacccaattctgttaattgacgaaaatgatgttgaggcaggacatgcggctagtgttggcccagttgatcaacaacaaatgtattacttaatgagtcggggaattccgcgcgcacaagcagaacgaatggttattcgaggattcctaggagcagtcttgagtgcaatcccagcagtggatgtacgaaataagttaattacgattcttgaaaggaagctcgccgatggacaacaatacgaatgattatttagccgactttccagcacttaatcagcgagttaatgatgaacgcttagcctaccttgataatgctgcgactgttcagcgcccacgtcaggtaattcaggcacttattaacttttatgaacaagataatgcaaatgttcatcgaggggttcataccctagcagaacgtgcaactaaggattatgaagaagcgcgaaaaaaagtgcaaaagtttattaacgcgtcgagtgctaatgagattatctttacaaagggatgtacggatgggttgaatctcgtcgctgcaacctatggcgaacaaaatattcaacctggtgatgagattgttatttcaataatggaacaccatagtaaccttattccttggcaacaattagctaaggaaaagggtgctaccctgaaatatattgaattaactccagatggcgaacttgatcttgcagatgctaaaaagaaaattaccgataagacaaagattgtggcagtagctcatgctagtaatgtattaggaacagtgacgcccttgaaagaattagcaacgattgcgcaccaacatggggcaatcgttgttggtgatggagcacaagcagttccccatatgccagtcgatgtacaagatcttgatgttgacttttacgctttctctggtcataagatgatgagtccaatgggaattggggttttgtacggaaaagagaacttattacgagcgatgtctccttaccaatacggtggagaaatgattaatgacgttcaccggaatgagagtacatgggctgatatcccgtttaaatttgaagcgggaacccaaaatattgccggggcagttgggcttggagccgcgattgattatttaaatggtattggaatggataggattgtgcaaaaagaacaggaacttgttaattatgttttacccaagttaattgctattccagatgtcgaagtttatggtccgcaatcgccagcaaaacatactggggtaatttcctttaacatcaaaggtctccatccccatgatgttgccacggcccttgatatggatggggtagcagtccgtgctggtcaccattgtgcgcagccactcatggaagacttgggagtaacagcaaccgctcgtgccagtttttatttttacaatactaaagaagatgctgatcaattaattaacgcaatcaaggaaacaaaggagttctttaacattgggactatctaagttaagtggtttataccgtgaagtgattctcgaccatgccgatcatccacataataagggagaattagcaactactacgaatgcaatgacccttcataatccgacttgtggagatacgattaatcttcaagtcgaagtagaagataacaagatcaaaaatattgcctatactggtgatggctgtactattagtcaagcatcagcaagcatgatgaccgatgctgttaaaggaaaaacaactgaagaagcccttgcgatggcaaagactttttctgatatggcaattggcaaagaacattcagaagctgacttggatcaactaggggatgcccggattcttactagtattatggaatttccagcccgaataaagtgtgccacgctctcatggtgggcattacaacgagcactgttgaaggatagcgaggaggaagaaaataatgagtaatgatgcagctagcattataaataataatgaccagtacgaatacggctttcacgataacgttgagccggaatactcaactgggagagggttaacagaagaaactgtccgcaaaatttcagctgctaagcatgaacctaaatggatgctagattaccggcttaaagcctacaagatttataaagaattaccgatgccaaaatttggtccagatttatcagaattagacctgaagaacatgctttactaccaaaagatgacggataaaaagtttcgcgactgggatgatgtgcccgaagatttaaaacggacttttgatcgcttaggagttccggaagcagagcgaaaataccttgctggttcttcagctcagtatgaatctgaagttgtttatcacaacatgaaaaatgagtttgaaaagctggggattatttttactgatacagatacagccttaaaagaatatccagaattatttaagaaatggtttggtaaattagttcaaccaactgataataaatttgcagccctaaatgcagcagtatggtcgggcggttcatttatttatgtaccaatgggcgttaagacaaagacgccaattcaatcttacttccggcttaatgcggaaaactcaggacaatttgagcgaaccttgattattgttgatgaaggggcaagtgttgattatgttgaaggatgtactgctcccaattactcttctgatagtctccatgctgccgttgttgaagttaacgtctgcaaggatgcttattgtcgttacacaactattcagaactggtctgataatgtttatagtctagaaacaaaacgggcagcagcagcagaaaacgcaaccatggaatgggtcgatgggaaccttggctcaaaagtcacgatgaagtacccaagcgtctaccttaatggtgagggggcacggggaaccatgctttccatcgcagttgccagcaacggaatccaccaagattcgggagcccgaatgatccacaatgctaaaaacacatctagttcaattgtttcgaagtcgattgctaagacggggggctcaactgattaccgcggaacggtccgctttggtaagcactctgatggctctaaagcccacgttgaatgtgatacgatcattatggatgaccaatcatcctcagatacgatcccatataatgaaattgacaatgctcatgtcgcaatggaacatgaggcaaaagtatctaagatctctgaagaacagctttactaccttatgagcaggggaatttcagaagcaaaggcaactgaaatgattattatgggctttgtggaaccatttacgaaacaattaccgatggaatatgcagttgaattgaaccgtttgatcagttttgagatggaaggttcaattggttaattgaattaacaaataagtttggaggaacgcttatggctgacgaaaaggatactcccttttccccaattgaaaataaagtgatggatgcgttggaagaagttattgacccagaactgggaattgacctcgttaaccttggccttatttatgatgttaaagttgataataatggtgaatgtacggttacaatgactttaacgacaatgggctgtccattaggcgacatcttaaatcgcgacattaccaaggcagttacttctgttgaaggtgtaactaaatgtaatattaaccttgtgtgggaacctgtctgggatttgtcaagaatgagtaggtttgctaaaattgcattaggaattcacggttagatataggaggtcagacatggatattaaacgctttgtttatcaacgaaaaagactcggctactcacaagttgccttaagcaaggggatttgtacccagtcgaccttaagcaagtttgaaagcaatggtcaagtaccatcactcacgattttggcgcagctttgtgagcggctaggattaacgattgatgatttaagtaaggataatacgtcttcaattcgttatatccggagtctgctagaccaaattgaattagctttaatgattgaacactttccacaggcagttagtaaccttaagaagattcggcttgaagatttaaaatcgccacaagaccggatgcaatattattatttaaaagggatgatttacactttaactaataataacgcgtcgacaagtctttttaactttactaagattttagatgaactggatgagcaacatcggacgatcttttcaccattagcatatttaggatcagggatcttatatgcacgacaaaattcaatggaacatgctgatttctttttctcaaaggttattgcattcttaagatcaaaggctgatgaagacttagcgggtgttgatcggaactattatctacggattgtaacgatgatgtactacgctgccgagtatcattcattaaacaagcggttggaagttagtaaccaagtgttggaggctacgacaaagatctgtgctagcaaccacgttacttatttcttaccacgaatcaaattactagaagcaaataatacaattgagttaggagaaaactcgaaaaaaatacgtcaacttttaactgaagcagaagtatttgcgcggttcaataaaaataatgttgttgaagttcaagtagctgctcttttaaataattttgataagacaattagtaataaatgaaaataatgaggctgggagaaaactttgttttctctcagcctcaatgattttcgcgaacaatagtaagataacgtggaagccaaataggctagctccgcgtcgtaatcataagactcgaggctaagtacgaacgataatcagcccgtgccgtgctaatcaccgttctatccttagcctaccgccttgtcgagaagattattttccactcccattatctataggtctactaattgatgtttaactgcatagtggagaagttctgcgtgtgaagcaaggtttaatttttgcataatctttgtcttatgggcttcaacagttttaggggatataaacatcttagtagcaatttctttgttagtatatccgagaacgattaacggtaagatttcttgctcacgtttcgaaagagcaacgtaatttcctaaatcgaagtgcggagaaccgcctttgataactaataaatctttcttcgttaccataatattattgtctaagtatttttcaccattaatagcgtgtcttagggcatgaactagttcttttggagaggagcttttaaagatatagctatttgcgccattataaattgcctgattgatgtattgaggttcattacgagaagaaaaaataataattttggtgttagggaaatgttcatgaattcttttgattgtgatcagaccattttcaccaggtggtatcgctaaatccataataatgatatcaatgtcaccttgttcaacccgtaatgaggcatctattccggttgtttcttcagcaattactttaaaattatctagttgttcaaccagatttttaactgccattcgaatgatgggataattatccgccacaagtactctatacatcaataaacctgctttcattcttaaagttatctcttcttcagtatcttctttttgctaataattatcaagatccaaaagttatttttcacacttgctgaaatagtttcaataaacggctggaataattgtgaaaatttattgcagaataaaactaatgctgtaaaataaaagaggatcattgatgacatgacaacatcaatgatccacagtagaagtatgttggcgaaagtgattgcagaatcaccttcaccttttattataccaattttttgtcctaatgtaataaagattatctttttatctataaattattttatgaaaagagtggaaaaggcaagaagagcaatcaaaaagccaattttaacaattttattaagttgattgaagaaaaaataataatcatctaataattaatgcatttacggattgtttgatctagaatataattattagctattcttgaatcagagaaaggtgaagcattgatggcagaaaaaacatttacaacaaccgaactcgctgagttcgatggtcgaaatggacatcctgcatacgttgccgttaaaggcgttgtttacgatgtctctaacgttccgcaatggaaggatggtaaacaccatggaaaccttgctggtcgtgatttaacttcagtaatgcctcgttctatccatctggaatcagtccttgaaggtatccctgttgttggcaaactagttgactaggaataactatgtaaaaagctaggaattggtagttttaaactatctcttcctagctttttatattgtaactttgaaataagcttgcaagtatttcgccagcccgttatgctcgttatcaattggggtcacatcattagcaatacttttaagctcagaaatggcattatgcattgcaacgccacgtccagctgcatcaagcatttctaaatcattatgctcgtcaccaaaagcaataatattttgccggttaatttggtactgcttagcgatataaaacattcctgactccttatgagtgccacgatggatcagttctaagatgttgtaagggccaccccatactcgtggttcaacaaaatcgccgtatttttcattaactgctttaatgatttcttcttggtgttctggttcatattggatcgtcattgcgattggattgcctgttaagttagtcgcggttaggatttgatcatcgcgcaacttgttcggtaagaattcgggtaaatcattactagcttgattagcccatacatgatgtttattttcaacggtaattgttttaattcctagttctttccggtgggctagaagatcgagggctagctcccgtgttaattcaacatcatattctttatcccagtgttcatgaggtatatgcgttagggccccattaaagtttaccatcggagttttaatcccaatttcatcgtaaatatgtttggcaattcggtaaggacggccagtgatgatgctgacaatatgtccatcccgggcaagggcacgtaaagttataattgtctcgtttgttaatttcgattgattatttaatgttgtgccatcaagatcaagcgcaatcaagtgttgatccattactatctcacttctctttccataaaaaattcaattataatattgtaaacaaaaacttaacgctttgccaagtattttgacttaaaaagactaaaaaatacgttacaataaagatattacagtaaagaggagcgaaaaataacgtgcaattaccaaatgaatttgtcacgaaatacaaaaaactaatgggagcagaggccgatgagtttttatcagcacttgctcagtcaagttatagtggttttcgcgagaatccattaaagaacggacagccggttgcaacaattgaaaaagccacgggaaaagtaccgtatgtgccgacaggatattatggtcaagtgaatggaaaatcattagaccatgttactggatgggtatatagtcaagagccgtcagcaatgtttgtaggagaagtggttaatccacaagctggagaacgagtgctagacttgtgtgcagctccgggaggtaaaacaacacacctcatcgctaaaatgaacaaccagggactattagttgctaatgaaattttccctaaacgggcgaaaattttggctgaaaacctggaacgatggggagcaaaaaatgcagttgttactagtgagagtcccgcagatttagaaaaacaatttcctcaatattttgaccggattcttgttgacgcgccttgttcgggagaaggaatgtttagaaaagagcctgccggaattgaatattggtcaccagaataccctgctgagtgtgctaaccgtcagcagaagatcctagcatccgcaatgaaaatgctaaagccaggaggaacattagtctattcgacctgtacttttgcaccagaagaggatgaacaaactatttcatggttgcttggtgattatccggatttaaaactcgtcccgattgaaaaggcagtggggatggatgatggtcgtccagaatgggctgatggcaatgaagagttgaaaaagacagtccgattattcccgcaccatctcaagggggaaggacatttcattgctaagttagtaaatggtaagccagagtcaactaatgaaaagcgcaaaaagaagaataagcggaaaaagcaatcgattgttaaaccggacaaagaacagatcaaactctttaaccagtttgctacaagcgtttttccagactatcaaccacaccaattgattttatttggtgaccagctctatgatttgccattagaagaggacaagatcgagggactaaatgtacttcggcctggacttcacctcggtacttttaagaaaaatcgatttgaaccagcgttggcatgggcccttgctagcttaccacaggaggcaaaacgggtcattgacctaaacagagaacagtggcaccaatatgtccatggggatgtaattaatattgatgctgaccttccgaatggttggtatttactagtatgcgacaaacatactgctggttttggaaagttggtcggtaaaacaatcaaaaacttttatcccaaggggttacgtttttaaattaggaggattatcgagatgaaagaaaaaacagcctttcacgttaacggctacctcgggttactcggggcgattattatcggtttaattagtttgtggctgatgtttgttggctttacgcgtaattttccggtagtcctgacaattggaattattttattcttaattgtgattctttttagtacatcattgacaattattcagccaaatgaagctaaagttttaactttttttggtaattatattgggactattcgtgatgcgggcttatttatgacggtaccatttacaaataaggagactgtttctcttcgtgtctgcaattttaatagtcaaattttaaaggtcaatgattcgaaaggtaatccagtcgaaattgcggccgttattgtctacaaagttgtcgataccgcaaaagcactcttttcggttgatgattatgagcaatttgttcaaattcaaagtgagtctgcggttcgtcatgttgctagtgaatatccctatgatagttttgaagatcaagatgcaattactcttcgcggaaatcccaccgaagtgtcagagcgtttaactgctgaactgcaagaacggttaaatgtcgcgggggtcaaaattattgaaacacggttaacgcacttagcctacgcaactgaaatagcgagcgccatgctgcaaaaacaacagtcatcagcaatcctatcagcgcgcaagataatcgttgagggggctgtttcaattactgaagaagcgattgaacgcctaagcaaggaagccaaccttgatttaacagatgagcaacgtttgcaaattatcaataatatcatggtagcaattattagtgaacggggaacgcaaccagtaataaatacagggacacaaggataaatgatatatttaacaattttaatgtctgagcgtgttggtttaattattattctagcgtttttgctggttagtgtacccctatttcgccgcctgttatttaatcaaaccattagtgccaaaattcagctaacgattcttttttctatttttgctattatagctaatatgactggaatagagatcgatgcgaataaccagttgcataataaaattattcttacggccatttcaacaaatgactcgattgtcaatgtccgaattttggctgtttcagttgctggaattattggtgggccatgggttggtagtttagtaggattagtagcgggggtccatcggattattcaagtgcacccctgcaaggttggttttatgtgcccagctcagttttgattggtgcgctttctggttttttgtatcatgatcgaaaaagttattttaaggtaatgacgccgtggcatggttttattgtggggattttgatggaaagtattcagatgctttttatcttgctattcagtccaacgggatgggatttagttaaatatattgccttgccgaattcctgattaaggtctttagactaaagaaaatttctaaggtcggaactggtcttggtcttggatccgctggtcacactgttggatctgctaaggcggttcaactagggtcaattcagggagcaatggccgcagtggcagttgttatcgtttcgttagcaatggacattttggttcctatttatgctcatctttttatgtaaattttaattagggagagaaaaaggagtatggcgacagaagaacatcaaaaggttgttttaattggtgatggagttgtggggtccgcttatgcttttagcgtgatccagcaaggtttagctgaggaattagttattataaataagagtaatgagcgaagcgttggggatgcactggatttggaagacacaacgccatttactgccccagtaaaggttaaggctggtagctatcaagattgtaaagacgctgatattgttactatttgtgcaggtgctgtgcaaaagccaggtgaaatacggcttaaattagttgaacgtaacttaaagattatgaaggaaatcgttcaagaagtagttaataccgggtttaatggaatcttcttaattgctgccaacccagtcgatatcttgacatatgctgttcaaaaaatttctggttttccagcacataaagtaattggatcaggaacctctcttgattcggcacgcttaagagtagcacttggtaaaaggttagcaattgatccccgagatgttcatgttgatatgttagcagagtacggtgattcagaatttgctgcttattcttgtgggacaatcggtggaacgcctttaatggattatgttttagctaatgggctaacaaagcaagaattgttaaaactagaagaacaagtacgtaataaggcttatgagattattggccggaaaggcgcaacatattatggagtagcgactgctttggcaagaataacaaaagcaattttgtatgaccaaagtacagtattacccgtaagtgcatatttagatggtgaatatggagaaaaggatatttacctcgggacaccggctgtaattgataaagatggtattcaaagggtagtagaattaccattagattcgcgtgaacaagaggctttaattaattcagcatcagttttgcgtgaaacgacagccaatggaatgactaaagcgggtctattgaactatctttggaaataaataaaaatgactaagattgaggagcaatattttcctcagtcttagtcatttttgcattatagtgaccgatgatggttatttatttgtttcgattaagtgtttagccaatgcaaaattaccgagagtagcagagccatttcctggaacagaagggttgacaatatattcatcgagcgatccaactggaagatagtcattccataacattgcaaattgcttccgaacccgttcaagaaaggctgggcgcgaaacacttccaccgaagataattttttgtggccgcaaaatggcagttacctgaactgccgcttgtgcaacgtaataggccatgatatcccaaacagggtgattatcaggaacatcttcgccgctaataccgagccgcgccttgaaagttggtccagctaccaatccttccaagcaatcgtggtggtaagggcagataccagtaaagtttagatcagctgggtggcgttgtaagcgaacatggcccatttcaggggtactaattccaccaataaagcggccattttgaattgctccagcacccacgccagttccaagggtatagtaaaccaaggccggattatcatacttatcttttaaattgacatattcaccgtaaaccgaaccattgacgtccgttgtccagtagacgggaatattgagggcttcagtcattgtgccgacaaaattgcaattttgccacttaactttaggagtatcagtaatataaccgtacttttcactagccggattagtatcaattggtccaaaactggcaattgaaagtgcagctagttcagggtactgcttaaaaaattcaattgaagcccctaaagtttcttcgggggtggttgtagggatgatttttttatcaatttcattaaaattttcgtcaccgacagcacagacaaacttagtaccgccagcttcaatacttcctaataacataatcaaaaacctcatttaattaaagtgaacgtttatcaatctgataaccatgtttgagtataaaccttagaaaacggtatcacaagcacaattactctctttttacttataaaacgtttcactaattcaaattaatttctgaactttcgcgccaagtggctttggcaggcaaattaatatgaatagggatttcatttggattattcagacggtggactagtctttgaactgctattgtccccattgaaaaactcgctggattgatcgatgaaagggacggaactaaatattcagcaatatccgaatcattatagctaataatttgaaggtcttggggaactttaagctggtgttgcttcagggctcgatatgcgccgatagttagttggtcactagctattaaggcggcctgaaaattatctttcaaaagagtattcatgctgtcaaagccatctttaggagtccacccattaaggacaatcaatggagaaatattatgaagtcttgtccacatcaaataggccttagctcgaatatcttgatacgagtctgtcgtttcgccattattattcatgggatgaatatttccaccgataaaggcgattttattaagtccattttctagtaactgatcaagaacgatctgagtggcttcaaaatacgaattacggataatatcgtaagcggggagatatcgatagtcgtcaattaaaacgatatggggattgtttttagctaaattagcgtagaattcttgcgtaaaaactccggcaacaattacgccatcatatttttgagcgtcagtaaattgaaaggctttattgggaaaacgaacaaaagctttgatttgaatgttttgcttggaagcttcctgaataattccatcatggacttgaatgaaataagggtcatgagcttctgtctcgagcgaatgagttgtaagcactagaattgaacgaggagttggcggcggagtaacggtcctgtttaggtggggatggtaattatactttgctgctacttttttaattcgtgctcttgtttgttcacctactgaaaaagatgaatcattgcttaagacacgtgaaacgctggcaggagatacaccagcctcacgtgctatttttctgataccagtcataggaaaacctccttttaatcaatttctagcataacatatttttagtaaacgtttagtagccaatattgacggatgattgctggcatatcaataatgaaagcgcttgacgagaaataactaaacgtttattatagaatcgatttcaagaaaggggccacaacgaatgattacatttgatgaacaacaacgtgtttttcacttaaaaaataaagaaatttcctatttattttcaatagaagagggaaatatcctcagtcacctttattttggaccggcaattcgtaactaccatggtgaacgccgatatccacgagttgatcgtggattttcagggaaccttcctggatcgatggaccgaacttactctaaagatgatttgttgcaggagtattcgggaaacaataccggagactatcgtgtgcctgcaattattatcaaaacaaaaaatggttcacgactgactgatttccgttacaagtcttataagattttaccggggaagcccaaactagctggattacctgcatcttatgttaaaagtgataaagaagcagaaacattggaagttactttggttgataaaacaatcggtgcacaacttattctttcatacaccatctataacgaacggccggttattacacggaatgcgcggttagtaaacacaagcaatcaagaattacgaattgaaaagattgcctcaatgcaactggatttaactaaacatgattatgacgttatctccgttccaggacaatatgctcttgaacggcaacctgaacggcaagaattacgtcggggaataacagaattttctagccgtcgaaattctagttctcatcatatgaatccgtttgtggccttggttgacaagaacaccgatgaatttcagggaaatgctttgggagtgctccttgtctactcaggtaatcaccagtttaccttggaaaaagatcagatcgaccagattcgcttaataactggaattaatgattataactttgaatgggttcttgaaccgggaaaagattttcagacacctgaagcaatcatgggctttagtcagcgtggcttaaatgggatgtcacaagtattccataagttattacgagaccgggttgctcgcggtaagtatcaatatgcagaccgaccaattgttattaataactgggaagcgaccttctttgactttgatgataagaagttagaccaaattattgatgaagcaaagccattgggaattgaaatgtttgttcttgatgacggctggtttggccaccggaatgatgataattcatcgcttggtgattggtttgttaaccaggataagcttactggtggattaaagcgggtagcagaccggacccacgagcattgcatgaaatttggtctctggtttgagccagaaatgatttcagttgactctaagttatataaggaacatccagactatgccttacatgaaccaaaccgtggaatgacactttctcgtaatcaattagtgctagactttagccgtaaagaagtcgttgataatatttacaatcaaatgtgcttaattttagataaggtgccacttgactatattaaatgggacttcaaccgtaatcttactgaggtcttctctagcgcagcggatgcagaacatcaaggagaagttagccaccgttatgttttaggtttatatgacttaatggagcggttagttacccgttatcctaatatcttgtttgaaggctgttctggcggtggtggccgctttgatgctggtattctttactacatgccgcaaagttggccatcagatgatacagacgcggttgaacggttaaagattcaatacggaacatctttaacttatccaatctcatctatgacggcgcatgtatcggtttcacctaaccagcaaactggccgttctaccagttttgagatgcggggcgatgttgccatgagtggggtctttggatatgaacttgacttagcagatttgactgaagaggatcggcaaatggtaaaggaacagatcaagttttataaggctcaccgccacttaattcaatatggtgactttattcgcttagaaagtccttttgatagcaatacagtcgcctgggaatttatcagtccggataagtcagaagcactgctatttatgtttaagcagttgcatactaaccgttttgaaattaataataccaagatggcagggcttgatccaacaattgattatcatgatgaaatgactgataagacttatggtggagatgaattgatgaatgtcggtttgttccgtgacccgactcgtacgggggacttcacttccgaagtgcattactttaaaggtaaataatttaaaataataaaagaggctgggaattaactattaattcttggttctctaacagtaaaatccggactatgatttttgatcgatccaaaaatcgtagttcggattttaaattatttatgaaattagtcgccaatcgactaattgattgtcccaatttcgttagatttaatgccaccagggctagcccaatgtcattttccacagctcgttgtccgcgtagatgagttcggcatatgccaaaatccctcttcatgtgatcaaagactggctcaacgtcgaacttctgtcgacgataaattgtcttgccttcgtcacttgagagggttgcttttactttagccttgtaataattccacgttgggttaacctgcatatagtgttgccgaccacttggtgtttttgccaactcatccaattgttctgacagttggtgcttatccgctcgatagagtttgaaatcacgttcgaaaccatatttatcggttcgcctactataacgataaaagctaaagcgaactcctaaatgatcgatgtagtaatcatcttcggcattatactgccaattttgtgatttagttggatcgtttttaaatttatgtttctgttccttttgataagttgtgtatggaataacaggctgcttttcaaactgatcaagaatcattgtgtaattgtactcactaccataaccggcatcggcaacgatatgcttaaagaaatctaaagcatgaaactgggtaagaaatggcactaaggtcctggtgtcagttggatttgaaaagagcccgtaatcaaggacaaattgcttatgtgtagcgatttgcaggttatagccgggcttcaactcccgattcatcatcggatcttccttcatacacataaaagtcgcatcatgatcagtcttgaaatagctattacgaccttggaagatatcttcggtacgttcatactttttggcacgcggaattaggtcgttgcttaattgatggcgaagttttttagaaaacgacggcgccgttttctaactgaaccacctttgatgatttttggttcttgcttaatctcttcatctaacttaatgattttctccgcaagctcttgtttcattacttccatgccttcggcagaagtaaccagctcgggtgccatttcttgcaccacttgtttttctactagttccccataaagcttactcgtcttttctcttaacttagcgtgatacttttcaaccgcccgccgccaagtaaatgaatatttattggcatcggcttctaccttggtcccatcgataaaaactgcatcattttgaattagtccgtgatctttcaaagccatggtaaagtagacaaaggcatgtttaattagcttactagcgtgctgactgcgtcgaaagttattgatggtatggtagctataagtataatcatgggctaaccaacgcattggcaggttcttatccaacatcatttcaatctttcttccagaataagtttgacgtgagtaggcaaacaagagaatcttaagcataattgctggatgcgatgaagggcggccggtagccgctcctgaatcttctaatagcacattttgtggaatcgagtcgacaaaatcactaattagccgcgcaatatgattttgtggtaaatcatagttatagtttagtacgaattcggtttgtcctatggtataattttgatacatggaaatcgctccctttggttgtttttaggggtaattacatcatatcaggaacgatttcctgtgtacataaaaaccggatgatgaattgttcaaaaaattcatcatccggtttttatgtgcgcccggcatgggtattagctaggcggtgagagtccgctatgggccgtagtagtcggaaccatgagctgaggacaagggtgtccactgcgaggtggaatctgaaggaagtctaaggcaaagtactgcaccgatgaacaagaagtagctataaggctggaactaactggataagactgcatgacaagttaaagtccaacactactcgaagttactttcagtaaagctaccggtgacatggtacgaaagttaatatccttacccggggagatctggcctacacgtttccgacaagaggaataagtttaatttccacagaaacaagcggtgcagtgatgtagcgttgagtaagccagaagtcagccgaggtcatagtagtctgagtaatcagatgaaggactgaacgacaataacttgtaacttatatcggaggtgtaatcaggtgcgacaatcgcagaaaacagaacaacaagctgaccgcttgtcgaggataggtttggaaaaccgaaagtacacaagggcgcgtagtaccgattatggtgaaggtaaaggtatgagtgtcactatccaagacttagtcttggaccgcaataaccttaatcaggcttatttgcgagttaagagaaataaaggggcagcaggcattgacgatatgacagtcaatgaccttctgccatatctcagagaaaataagacggaattgatcgctagtttgcgtgagggcaagtataaaccagcaccagtcaaacgggtagaaattccgaagcctaatggtggagtaagaaaactcggaataccaacagtggtggaccgaatggttcaacaagctgtggcccaaattcttacacctatctttgagcgtgttttctctgataatagttttggcttccgccctcaccgtggggctcacgacgctattgcaaaagtagtagatctttataatcaaggttatcgaagagttgtcgacttagacctaaaagcctattttgataatgttaatcatgacttgatgattaagtatcttcaacaatatattgatgacccatggacactaaggctcattcgtaagtttctaactagcggagtcttagaccatgggcttttcgctaagagtgaaaaaggaaccccacaaggagggccattgtcaccaatactggcgaatatctatctaaatgagttggataaagagttgactagacgtggtcaccactttgtgcgctatgcggatgattgtaacatttatgttaaaagtcaacgagccggagaacgagtaatgcgaagcattacccagtttcttgaaaagcgattgaaagttaaagtgaacccagataaaaccaaagtcggtagcccgctacggttaaagtttcttggcttttcgttgggtgtagaccacaatggagcctacgcccgtccagcaaaacaatcgcaacaacgagtaaagaaagcattgaggttattaactaaacgtaatcgtggaatatccctgacaagaatgtttgaagaaattcatcgaaaaatgcgtggatggcttcagtactactcaattgggaaactaactgactttattcaacgccttgacaagtggttgagggcccgaataagacagtatatctggaagcaatggaagaagcttaaaactaaggtaactaacttacagaagctggggctgtcccagcgtgatgcatatgtcttcgctagtacccgcaagggctactggcgaactgcacacagtaagaccttgagctattctctaactaatagaaaactggaacaactcggacttatgaatatgtccaagacgctccagtcaattcaatgtgattaagttgtcgaaccgccgtatacggaaccgtacgtacggtggtgtgagaggtcgataattgaactaatcaattatctcctactcgattttggactaggagttttttcccagcctcttttattattttttactttttattaatgcatcaatcgtccacatccagattgcatgtcctaaaaattcagaaacatgttcttcaagtggttgatcttttgcagcaggcactgttcccattaatggcattaacttgaggtggaagaaatcccaaacagcaatcccgaatggtattccatcgccttttttgatccacggcgctaactgtccaccgatactatagagaactccaaaaccagctgagaaactaaagtgaacaacatagcttacccatggcaactgttggccggaataggtataagtagcatgtgtaatctgtgttggaacgccaaattgctcaagcattttttgtggtgggtttgtttgatctcgctctggtgtccgtggtgggagaatattttcccaaccaagtttaacaaggccggcaacaagaccagccgttataccaactgtaattgatttgccccaattaattttattcacttcaatcaccatccaaacctttagttattaaatcaattgtatcaatcttaataggaatttcaattatttaggttagcgtaagtgtcgttgacgagcatatgatagtaagtctgttcctaaaacatattcaacacgtgaaagctcggtaaatgatgagcaaccaaggagcgcgagcaagcgtttgacaatcacttgccattcaccgagcgtttggtctaatgcttcatagccttcattttgaagaatattgaggaagtaaccggcaacaccaactgcccgggcgcctaatacaccggccttgataacatcgaggggagaagtaattccgccagaggcaataatttcagttttaccgcgccgaattgaatgagcttccaatagtgattcgggagttgtttgtccccagtccaataaactctcaaaattaatatcatggttacgccgattctcaatcgctgcaaagtttgtcccaccacgaccactaacattgatgaggtgaacgtcatgggtttgcagtttggcaatcgtcgttttgctcattccaaagccaacctcttttacaataactgggacttctagttcactgacaaggtattggatgttatccaaccaattaaaatcgcgatcaccttcaggcataattaattcttgggccgcattgatatgcagttcaagggcatttgccttcaaaagtgaaatagcatttatcgcttggtcaagactggcatttgcacttaaatttgcaaaaataatgccctttggattttcttcgcgaattatttcaaaagacgaaaaggattgggggtcttttgaaataatactgagagatccagttgccattgctaaatggtgtttatgagctaattgagcaagttgttggttgactttaagtgcttgatcacttccgccagtcattgcctcaatataaaaaggacattcaatttctaaattatcagctaactggacatgcaaatcaacatcatctgttgtcatttcaggtaagctatcatgaattagacgcacttgatcaaaataatgatgttgatgaacctggtcataatatttggcagctaatgaaaggtgttcgttttttcgttgggcatgacgtgattccatcatggagcctcctttgatctacttgtgaatgtaagaaagatggtgcttaacagatttcttgaagctttttgcgttatcgataaagtgtacggataaaggaagttgttcgatgcggtttttggcccagctctttagaacgttcccaaagttagagttgctatcaatagcgacgatcccacaatcaccgccaccagcaccagatgtcttagcagccccaccaaaagattcagcgatttggcaaagcttagataatgattcggtttcgatgtttacccccgaattagtgccgagttgttttaagaggtcacggttataacgaatttcatttttaatcgcttcaagatcttgacggtgaaaaccatcaaccattcgttggatacatgatttacttttttcaagaaaatgatgatattcagtttgacgacgagctttaaaaagagaaattttatcaacaagttgggaagttgaggctggtttaccagtccagccaattaaaagttctaagtttttgggagcagttagagactcaatattcagatcaggccaaggtaaatcaatgatcgtctttaggtcaagatacttacgttgttgggcaagccactgccgatcgaatgaatgataggaaatccaaccaccatatacggaagcggcaacatcacccaacgaaccatttccttgaacttcaaaatgggcaattgcagctaatttaaagatttggtccttgttaacgggcaaattatagaaccgacaaagagccttaacagttgctacagtaacagcggcagaggaaccaagaccatattttcgaccattagcactgtctaattgactgtcaatatggatattaaatattcgtaagtcgcgactaaaagtacgagcatattcttctgtaactctaatagcagaaagaatgtaagaaaaaggattatcacgtttgtcaactaccatttggtctcctaaacgtcgccaggataattgatcgttattatattggcgactaataatttgaccaacttcttgagtgctttcctcgattgtacaggtaacaaattgatctaacgcaactaaaactgcaggataaccattttcaacaacagcatattcgccggcaatatacaatttaccgggagctttttcagtaatcaaaatttaaagtccccttatcattaaattttattcattccaaatctttattccaggtcccggttgtgaaaccaccaaccgttctgggccaacaatattacttaatttttcaacaattttgctccggttttctcggtcgtaaatcactttgacgttcggaccggcatccattgtataatagcagtttattccctgattgcgcaagtcttccactgctttaatgatggttaacgtttcaccattaaagtaggtaaaaccagggtcagctgaaaaagtaagtgcgtgcatccgaagagcattttcttcagcaatatggccgatttggtcaatatcttttgctttgatagctttctttatggcaaccatatcattcgctactacttggcgccaagcatcatagtagggtgaagtttcaacactggattgcattccagatcgactggaaatttttttcctttttgtatcaactaaaactgctaacatttcgattggaaagtcaacattttctaaaactggttgtgcaaacgaggatgcatcatcagttcctttttgccattcaaccaatccgccataaatagatctagttgccgaaccggatccacgtcgggcaagtcgtgatagatcacggcttgagagatttaatccggccgcagtactagcagcgcctgctaaggcagcaaatgcggaagctgaggaagcaaggccggctgcagttggaacatgattaattgactttacgcgtgcaaaagcttttattccacttagttgccgaacaatatctagaacatgaactacttttttggcccctttcttactaagtgtttgttgatcgatggcaactaagtctgaagtaaggtgattatcaaaatttacggtagtagtggtgtaaaactcattaagcgtaagggagagactgtcagtttgtggaatgattaattcttgattcttctttccccaatatttaacaagcgcaatattagtatgtgcttttgcagttgccattagttattacctcgcttatcaagtggttgaagccaaatatcatgtgccccgttctcttttaggatacttgcaaggcggcgagctcccatagctgtttgcattaaggcgatcatacaaccgccacgaccaccaccagttaattttgcaccaagagctccattatcacgtgcaacatgaataaggtgatctaatgatgggtctgacacgttgagagcagctaaatcagtttgcgcaaagttaagagcatcgcctaattttacaatgtcattttgtgtaagatagtcttttgtttggtttactaattcaccgagatgcttaatatgtccttcagctttttcattgttatttttcagttcatctttaactgccaaaatagcttccttagtagcacctttttttccagtatcagcaattactaaagaggcatcaaggttcatttcaattggtaccccaatccgccccttaacataaaaaagcggtttatctgaactgacagtagcagcgtctaaaccggatggactacgatgtgtaatttgttcttcgacatctgcaagctgaagcaataatgttcgatcgagtggttcatcataataatcaaagaatgctcgaataattgcaatcgcactggcggcagacgaccccattcctcgttcagcaggtaattgactttcaatttttaagtcccaaccagtttcgtggtcattaaaccttgcagataaagtgtcaattaattttttaattccgatcatggaggaaggtaaatttcctagactaccatgataataacggcttttaataattcgctggttatcttggcgactgctgagcgtaactgataattgaacgcttggcaatggtaaggctattgccggttgaccgtatactacgctatgttctcccattaaaatgattttcgcatggctagtaccaatcccttgttgtttcaccatcgtaacctactttctatataaaaattcaaacttaatcatagcataaaacagtgattctagctaaaagcgattgtggatgttaccaaatctaaacattttagcacaaagaaaagccgattcgtgtaaaaatgagaaatttatagtagaatggtgtatcatttagtttagaatatttagtaacttaatataataacttcggagaaatatggtgatagtgtgacacagcgtagtagtcagcgcacaaaaaagcgtgacaagaaagcgccaatctactcagttgttgatttagaaacaaccggaacgaatgttaatcatggtgatcgaatcattcaaatcggttgtgttctcgttcaagatggcgaaatcatgaatcactttgaaacaaaaataaatccacgagagaaaattcctcgttcaattgttcaattaacaggaattgaagataaagacgtacgaaaagcacctttgtttgaggacattgctggaactatttatagtttgttggcggaaacgacctttgtggctcacaatgttaattttgactttcctttcctaaatgcagaattagagcgagctggatatccctcattatcaattcctgcaatcgatactgtaacccttagtcagattcttcttcctactgcaaagagtttccgtttacgagacttaactagttcgttgcatattgagcatgatcaccctcatagtgcagtatcagacgctgaggcaactgcagacttacttaatgacttgttaaaacgagttcaagaattaccaacgcttatgcttgaaaagattactcagttgaagctcaacctacctcagcaaacagccggggtttttgatgctgaattgcagcgtcgacgtaaatcgccccagccattaagcgaagagttgtatgtctctcacggaattgttcttcataaatcgcggccgattactgctaatggtcagcgagaaaagcataaatatccttccactaaaaaggcaaaggaaaagctatacggagatacgttgagattgcggcctgttcaagccaaaatgatgaacagcatttacaataattatactcatgctgaaccccaaaatatgattgtcgaggctggaactggagtagggaagacattgggctatctttttccgctaagttatgttgcatatcttgataagaagattgtcgtcagcacagcaactaatatcctccagcaacaaattattgatacatcaatcgcacagttaaataaggtgttgccttttaaaatgaatagtgtgattatcaaaggaaacgctcattatattgatattgcacgttttgttcattccttaagtgtgattgaagaatcgaagcttgttcagttgttaaaagctaaaattttagtatggctgctttcaacgcaaagtggggaccttgatgaacttaatttaaattctcagcagtcgccatactttactgaaattcgtcatcagggtattcggagcttgaatccagcaaatgccttttaccatgatgattttctcgttcggcgggaaaagcggcttcatcaagctgatattattattacgaatcatgcgtacttggttgctcatgcccaggaattaggggatggaactcgtcgcccatacttagtaatcgatgaagctcagcacttaagcgaaagtatcttaaaacggtcacggcgaacatttaattttcaaaaattgcgcacagcagttcatataatgtctggattagttaataatggcaatgaccggaacttaactgatattttcgctgaacaggcactaggcagttataatgttgaattgcttcgtggtgatctcaatgcagtagaagaagcggttgaccttttccagcaagccctttaccgtcaatatatggcaagcgctactggtaatcctgataatgaattaattgaacaaccactacaaaatgatcaagtgatggctcttttagatattagtgggcccgtgatgatgaagctagagcaggcattaagcagtgtgcagcttcatttttctgccctcagtcatttatttagcagtcagccagaccggtggttattaagtgatcgttacctcatgagccaatttcaaagtcagcttgcaaaattaattgaagccgatcagacactaaatgaatttaacgaaacacttcaacaacaaggagaggctgctgctttttggattactattcgccaatcaagtgaacaaagtgccttacagcttagtggggggctattggaagcaacccattacctcacaaagaatgtttatccatattttgctcaaccattatttgtgggggcgacattgtttacatcgccacgatcgccgtatctttaccaccagttagatttagagcgcaataatactttaacgcgtcgattcgcatctccatacaattacaaacagaatgctaaattattgattgcagaagatgcaccagtaccgagcgctcaaaataacagtgattacattaaatatctcagtgacacgatttaccaattaacgaagaatgctgattatcagacaatgattttattcaactcactggtgatgattgagcaggtatatagccaacttcgtgaaacggatctatttgatcagcgggatattttagcccaaggaattacgggtaatcgtgataaaatcttaaaacagtttagtggtggaaaaaattcgatccttcttggtgcttctagtttttgggaagggatagatttaccagagtccgctcttgaactcttaattattacgcgcttaccgttcgattcgcctgatgaaataatgaatcgtgctcataataagttacttcagcagcaggggaaaaatccgttctatcattcagaattgccaaaagcaacgatgcggttacgtcaggggattggacgattattacggacagaagatgatcatggggttgcagtagttcttgatccacgactacagacaagacggtatgggaagacgattttgagtagtctgcccactgatttaccggttaatagcaaaaaaactgctgacttgatttcaattactcagaagtttttacgaaatggtaaagaggacaaagttaattaaactttatcaacttttaattaccgatttctggtataatcgaaaacgattgtcatataagaatctaaaaaactaaagagataagagggaaaagatatgcaaagtcgacgtgaagttcagcgtgaacaaagtcgcggttcctcaatgcggacaattcgtaaccttttgattgcgattttactaatcttgttaatagtgtggagtgtttttgcagttagcaatcagccgcgaaattcagcgcgacgacagacaatttcacttgctgaaaaatatgctcatcttcaatctcctgaccaattttatatttataatcgagagaatacttactatacgattagtggcaagaatcagcaaaaccaaccgatcttggttatggttccccaacacggtggcaagatcagagttctaaaacaatcaagtgggattactgctgcgagagcacgagcgatgacaaaatcaaatcgtgatctgcgagaaattttaaaagttgctcccgggatatttaatgacaagattgtctgggaagtaacatatcgtaatcaaaaagggaacctctgctacgatctgattaattttaagactggacaatacgttcaaaatattaataacctttaataaaagctgaaactaatagaggctgggattactcagtctctttacttttgcaaaaatattttactaagagaggagctgattaaatgccagatgcaagccttttacaacattatttgcaggcaggagaaacaaatataagcaacttattgctacatcattataaagagttggggatgacaacttctcaatttgtcttatatcttcagttcaaatcctatcaggaccgaggaataatgaatccggatgttcgtacaattgcaaagaacttaggaacaaaagagcggcaggtgtttgaacagcttcaccaaatgatgacaaaccatcttgttgagcagaagatgcgaaaaatggaagatggtaaagaagatgcaatatatgatttttcgctccttatcaataaattagcattgctcaatgagaatgaccaagaggaaacaattaaggttgaaaatactaatagtcgggttgagacatttaatcagctagaggccgaatttggccggccactctcatcaatggaattgcaaattgttaatgattggttggataaagataattattcggcaataatgattaaacttgctttacggcaggcagtaatgaatagtgcgctaaatctccaatatatggaccggattctacaaagctgggatcgtcagggcttacggacagaaagagatatcaatgagcacgaaaagaggtttgaacagcgaaaagaggctggacaaaagccagaaaagaagacattaaaaaagcctaaaataccgatttataaattaggcgaataaaattaaataaagggtggttgacatggaaaaatcttcttctcaagtaatgaaaggaattatatgggcagcggttgcctccgctatgtggggaatatccggaaccgttttgcaactcatctcacaaaatttagcaattcctgctacgtggatgctctcaatgcggactttttcagcaggagtaattttattagtaattagtgtatttttatatggaaaaaagatttttaacgtatttaagacacgagcaactgctatttcagttattagttatgctattttaggattgatggcaaacctgcttacgttctattatgctattcaaacaggaaatgcctcagcagcaacaattcttcaatatctttccccgctttttattgtgttaggtggaattatttttatgcatcgtcgtccgttcaggagtgatattattgcgtttgttgttgctttgattggggtagcattatgtattacgcgtggtaaccttacccaattagctttaccgtttgtatctcttctctggggcttaggttctggaattacagctgcattctatgttgtccttccacaacgtgctgctgatgaaaatccgccaattgttgtcctcgggtgggggacgatgattgccggagtcctatttaacctctaccggccattttgggtcaatccaccacatattactaccacgttagtagcatcggttgcgacggtggtgttattcggaacgattttaccatttggaattttgcttcatgcaactagatatgccccatctgatgtagttagtatcatggatgctgttcaaccaattacaacttcgattttaagtgtgatcttctttaaattgaacttgaattgggcagaaattttaggaattattttagtaattattgccgtctatattctacaaaatggtcggcgaaaacgtacaattcattattaaaaaaagttgataataaaaaggattgcggagaaaattccacaatcctttttattatcttcaatttttaaaagatcttattagggattagttgtgcttggttgtgtagcagaggcagggctagaacttgaactttgtgcgggtgcagatgaacttgaactagccggagcactgcttgatgaagactcagctggagtattgttgcgttcttctgtgcgactttcgctgctactacttgaagcagagctagaagaagatgaagacgatgatgaatcgcttgagctagaagtagaactactatcacgatcatccgatgtatcttcagtgtaatcaaatgcccattttgaatcacgaattacaagctgacgtttacctttaactcgaacagcctcaacagtgtctggcatcgtccaatcagatgcgtgattttggctgtcaagatattgcattaagtccttgtaaagcaattgcgctgactttacatactgttctgaaatgctgccaccaggttcgagtgggtggtcataaccagtccaaactgcaattgagtaattcttagtataaccagccatccaggaatccattacgccagactggctagaatttccagggtagtttgtcgtccctgtcttaccagcttggttaacaccgtcgagtcgagcgtcagttgcgcttccttgtgaatctgtgaaaactcctttaagcatatcagtaatcatgtaggcagtagccttattcattgcgcgtttacctttaggattgaattgctttactgaaccatcttgagtagtaatcgagctaatgtagtaaggtttgtagtaagtaccaccattagcaaaggccgcatatgcagcagaaacttggagtggggagatatacagcgcaatcccgttttgtaaagtatatggttgtttttgtgaaattcctaatccatcaaggaaagaagtagcacgcttaattccaacagcttgcaatgcgcgaatagcaggaacattccgtgattgaactaaggcttcacgcattgtcatattacccttgtactttttgtcaaagtcatgaaggacagtgttggtaccaggaaagacaaaccgcgtatcagcaattgatttaaaagttggccattgcaagtattcgatagccggaccataatccattaatggctttgcggttgacccagaactacgattgctttgcacagctcggttaagtccatacacaacatttcctgtgtgacggccaccgagcatggcaataatttgcccgttgtgggggtcggtaacagccactccagcttgcattttatcgttttggaactgaacatttttatttgcagcatcataaaggtgttgttgcgcatcgaggtcaagattggtgtgaacctttaacccatcactataagggtcgtatccttgtgcctgtaaatcagcaagaacctgctttacataaggatccacaaccttagaatctacagcagttccgcttcccgaaatattaccgtgatcagggtctaaaccagcagtaacgctgtcgcttgcagcttggttagcctgggattgggtaatataattgctgcgaaccatcgcattcaatacttcattgcgccgttgcgttgcatactttgtgttacttacaagtggattatagtaagtgggagattgtggcatcccagcaagcagggctaattgggaaaggtcaagatcgtttaaatctttaccgtagtagtactgggctgctgtttgcattccataaattccatttcccatgtaaaccttgttaatgtagaaatcaaggatttgactcttgctaaaatgctgctcaacattaatagcaagccatgcttcttgggctttacgttttaatgttcgatcagaggcagccgttgagaagacggataatttaactaactgttgagtcagcgtacttcccccctgcatcccggctgaacgaccaaaaacattagaagtggctgctccaagaattcgaattgtatcaacaccatggtgcttgtagaagcggcgatcctcaattgaaacaacagcattttttaactgctttggaatttgattatccttggcatattctcgcttttgtgctcctaaacgagaaattactcgattttgatcatcgtaaatagtcgtaatactctgacttgttaagtcgcttctactaattttaggcgcgcttgaggcatagtagaaaaataaagctgcagatgccaccattagtagaacgacgattcctgctacccatagcaagattttctttattaagctgccaacattgcgctgttgattgtcattattattattatgacgctcactacgcgttgactgattatcatttgacatagtaaactcctttacgcttttgcagcaattattttatcaacagcgtttaaatatggtaaacgcggattgagttgataatgaatttgatagccttctttagcgatatcagttcgcaaaattgatttacggccgccattttgctgttggtcccaatatttaaacaggttggaagcgggaagcaggtatagcaggtcaagctccgtaaatttaatgaaagcaaaacaaattcctccctgtgctacacattcacgcatatgttgaatttggtggggatgaaagttctttaatggaaaagaatttttattacgtgtttctttagcatcaaaatcaatgtagtatccacggtacactccattgtaatcagtagttgatggtcgccgaaaatatgcttctttaataacagccgcactccgcttggggtaatcaacttttacaagctgaataggggtaggctttttatgaataacagcaatatggtgagccaaatagtaatgattactatgattgatctcatcctctaatgacatcccacgtttggcataaatagattgatgtggtgtcggtaattcattatgtgtattatagtgttgtacaggttgctgaccattgggatagtgaatggtcacagtgatcactctcctaactagagatttattataccagactcgttacataatgattgatacaagatgattacaagtttaagttaaaggctttagggagaattttatgaagagattatggattactggctatcgaagttacgaactaaatatatttaaggatgatgatcccaaagttcaagtaataaaagaggtgctaaaaaaatatttaagggctcaattagaattaaatgatgatgaattttgggtaataactggaccacaaatgggaacggaaagatggggacttgaagctgctttagaatttcaagcggattttccacaattaaaaacagctttaatgtttccctttgcagaatttggtaagcaatggaatgaaagtaatcagttgaagctgacaaatattacccagcaagttgatttttttgctaatgtttcagataaaccttatcaatcgccacaacaattacggaattatcagcagtttatgcttactcatactgatgaggcttttcttctttacgatccagagtatgaaggaaaaactaagtatgattatgagacgattcaaaaatatatagaagaaagtgagtattcgatgacgcttgttgattttgatgaacttcaagaagaggcagaagaatgggccgagcgtcaaagggaaaaagatgaattttaatcttgcattttttctttgatttggtattatagttattggactacgcaaactaaacaattgaggtgtttaagttggataacataaaatttactccacaagatattttgcacaagcaatttaaggagagaaatattggcaaaggctacgatgaagcggatgttgatgctttcttagatgatgttattaaagactacgacacctataacaaagaacttgaacgtttaaatgatgaaaatgaacgtttgagagcaaaggttgatgaattaaatcgtcaagtagaagttggttcatctatgagtagccaaactacttcccgacaacctgtatcgagcgctacaaatatggatattttaaagcgtctatctaatctagaacgtcgtgtatttggttcacagttagatggtaatgataataatgactcacatttgctttagtgcgtgtcgaatagtttattaataattttgcaagttttgggtaattgagcacagcttatgttgtgttaggaaggtccatgctcgcacaggctgcgatgcctgtagtgtttgtgctcgctgaaaaaataaggcggggcaccattttatggtgacggcggaaaaacggactaaggttttaactatgtcttagtattcctgaaaagtgccacagtgacgatacaatgttggaaacgatattggtggaacgcggtaaacccctcaagcggtaaacccaaactacggtaggggagctttggataacaaattgaagtgattccaggggagagtatttcggtactctgagatagatgattacctcgatataattatgcctgataattatattacgacaaaacatggcctacagatacttgcatacaggcacccgagttcgctcgggtttttttattttaaaaatcagagtatggttttattggttctctttttgtagaatgcgttaataattactcgcttgaagtaaaaagttaaatggcgataaattaaattttagaagcttaagatagatattacttaaaatagcaataaaatataaataatcgtttcattttattgcaagtgcgcctataatgttaaaggggttagaaatgagttatttgtaaattagcttatcttttgattaataaaattagataatgaagttagggaattatggataataagagaataaaaattgtatatatgtcgttttctgggaatgtacggtcatttactcatcggcttcaagaatacgcaacgcaacaacatcatttgaataatgaaaatcctttagtcgatttattggagatttcagaggagacacttccgactgaaagcgatagtaaattttttgttttactaccaacatatatgattggtggaagtagatttacgccgacattaacagagattttaacaacaccaatgcacgattatttggaaagctatgacaatgttaaatgttgtgcgggaataattggcagtgggaacttaaccttagggaagatgtatgtaataactgccaagacatacgccaaagaatatggtttgcctttattggacgcatttgaatctcgtggcaccacctgggacatagaacgcgtttataaaatattaactgataaagtaaatgagaattcattaatgtagttagattaaagtcaactaccattcataaacaaaaagggattgtgacataagttaagttactttcataaaaagcaaatacgcagtacaacaatggcctccaacgtccggcaaaaaagccaaacattggaggcctattgttgcttgcgaggtctcccagaggctagtttcgcgtcgaaaaacaaagtaacaagtgacttctgtctcgcttccttttgtttcttcttgcgtcttcttttcattttaaagcaacataaggtaaaatagctaataggaataagtctaaaggagcgtttaatgtgcaaacatatcagttaattgctactgctgctgcaggtattgaagcattagtaggaaaagaactaagagatcttggctatgaagtcaaagtagaaaatggtcgggtgcgttttcaagggacaatgaaggatgtcattcggactaatctctggctacggaccgcagaccgagtaaaaattgttgctggtgaattcgatgctcggtcttttgaagaattgtttgatcgtactgaaaacattgcatgggaagatttgttaccaattgacgcgaatttcccagtggaaggaaaaagtcataactcacaattgcataatgtgccaagtgttcaagcaatcactaaaaaggcgattgttcaacgcctcagtaatgcataccaccgtcggactcgcttagccgaaactggtgccacttacccgttagaagtagcgattaataaagaccatgttcttcttacgttagatactagtggagaagggctttttaagcgtggatatcgtaaaaataaaggtggagcaccgttgaaggaaaatatggcagccgccttggtgatgctggcttactggttcccagataatccatttgtcgatcctgtatgtggttcgggaacgattccaatcgaagccgcattatacggtcataatattgcgccgggcatcaaccgttcatttattagtgaacaatgggttaatttagttccagatggtttatctgatgaagttcgggatgaagccgattccttagcaaattatgatatcgaattagatatccacggatatgatattgatcagaatatgattgatattgctcaagaaaattctcgtgcggcaggattaactcacgatattacgtttaagcaattagccgtaaaagactggcaaacaagcgaagttaatggagttatcgttgctaatccgccatatggtgaacggttaagtgataaggaatcagttcatgaactttaccggcagatgggtgagttatatcgtccattaaccacatggagtaaatatattttgacggctgatatggaatttgaaaattattatggcgcacccgctaccaagcgtcgtaaactttataatggtgctttacgaacagatctctaccaatattggggcaaaaaagatcgctccaagatcaaatcccttaaatagcaagggttccaagcgattcgaaagatcgaaaataggtgctagggggcaaattttcccaataataaaagccttagtaggagttacattgtaacgaccgctaaggctttttctctgtttggtggctgatagaacacgtggatgatataattaaaacgatatgatgttttctaaaatcactctattttatggagggcctgatttgctaaattatgtgctccacgattatggctttcaggaatccactgggtaacaactgttggaaagtgttggagaagaggatttaatgctgctaattctttttggtaatgttttgtataatttttgccgattgcgtcacttaagatacggctatcagtataaaataggattgtttcattattgctaaagtgatcaattaaatatttaaatccaaagtgagctgcagcgaattcgccatggtgattatccatgctttccttatctactgggattgcaagctgaatttgcttatgattggcaattattattattcccaaaccagtagggcccgggtttccttttgttgcagcatctgtaaagattttgatcataaaactacctcttttctgaaaggatgacatttataattatggaagaagaaactcgttatttttaccaaccagaccttacggggacaattattagctggtgttggacttttctcttctttattgccggtctcgtaatttggcttgaaattactcattttcagtggctcagcgcgctcttttttgcagtttttgtaatccttgccttattagaatggcggcgacgaaccgtagtaatcactccgactaaaatggtgtttaatcgtttgttacaaaaacagtacctcgttatcccaatctctgatattcgtcagccagagtttaccaagcatacggtgacaattactgtgaatggagaggtaatgagttttacctttaccaccaaagcaattgcacgcttgaaattggcattgaaacaacagggggttcaataattgttactggggatcgctattgtaattattttaattttaacaatttgtgaccaattattaaaatcttgggttgcttcttcaattgttcttggtggtagtaagcagttaattcctggtattattgagttaactaatttacgaaattcaggggctgcttggagcatttttgaagggcaacaaactttttttaccattataactattgttgcgattattgtaattggttactttatctggcagtaccgtaaaaatattcctatgctaattggcttatcattgattatggcaggaacaattggcaactttatcgatcggttaagacaagggtatgttgtggatatgtttgaaacaacatttattaatttcccaatttttaacattgcggatatgtgcttaacaattggcgtaatctggctaataatttgcatcttaaaggagaaagactaacaaatgtctgaagaattagaattaacaattgatggtgagatggtgggaaggattgataagcagcttggtcatcactttgatcaattttcccgatcacaaattcaacattggatagaagatggtcacgtccttgttaatggcgaacaagtaaagcctaaatataagttgcttgtaggtgaccacgtccaaataattccagaagaaccacaaaaaattgatttaacacctgaggatattcctcttgatattgtatatgaagatgatgatgttattgtcgttaataaaccgcaggggatggtggttcatcctgcaccaggtcatccaaaccatacgcttgtaaatgctcttttatatcattcaccactatcaactattaacggagaatttcggccagggatcgttcatcggattgataaggatacctcaggactattgatggtagccaaaaatgatatggcgcaccgttctttgacagctcaattaaaagcaaaaactaataaacgagaatatgttgcgcttgtgcatggagttataaaagaagataaaggaacaattgatgctccattaggtcgctcgttaaaggaccgcaagaagcaggcagttgtggttgatggacgtcatgcggtaactcattttaatgtgttagaacggtttaagaattacacattagttgcctgccagttagaaacaggacggactcaccagattcgcgttcatatgaaatatattggtcacccgctggcgggagatccgttgtatggaccgcgaaaaacgcttactggcaacggccaatatttacatgctcgtttgttaggctttaaacacccccgaacaggcaaagaaatggtttttacggctccattaccagcctatttcacaaaaatgcttgaacatttacgtaagacagaccaataaaattattgtgtttaattcagagaacgttcataataatattgatcaattattaacaaagttttaggagagtgggacagtgacagcacgatacctaatatttgaagatggctcaattttcgctggcgaaggttttggttcaccagctgttacttttggtgaagttgtttttaacaccagtatgactggttaccaagaaattatcactaatcaggtttataataaccaaattgtcgtttttacccagccgaatatcgggagttacggcattcaacgtaatatttatgaatccattgtaccgacaattaaaggaattattgttcgttcccttgccgatgctggcaccgatgataatggacgacaattgacacttgataaataccttcaacaaatgaatattcctggaatcgctaatattgatacgcgagcagtagttcataagttaagaaaagctgaaaagccattaaaaggaagtattgttccagttccagatgatcacgcttttgaccagcttcatgcgactgttttaacgaaccagcaagttgctcaagtctctactcctaagccatatcctaatcctggaaccgggctaagtgttgttgtgattgactttggattaaagaacggaatattacgggaattgagtcgacgaaaatgcaatattactgtcttaccatatactgcaacggctgaagaaatattacggttagatcctgatggggttgtactttcaagtggaccgggaaacccaaataatgttcgtaggtcggtcctggaaatgattcgtactgtccagaccaaagtaccgatgtttgctattggactaggtcatgaattattcggaatcgccaatggagcaaatgtccagcaaatttcggtcgaacaccatggggtgaatcacccaattcatgaaattattactgaccacattgtctatgcgactcaagcagaaggatacttgattgatcgtaattcggttgaccgctcccagctttttattacatacgttgacatgcttgataatagtgttcaagggcttcgtcatcgtcgctatccagctttttcagttcaattctttcccgatggtgcaccggggcctgatgaaactgatggcttgtttgatgagttcgttgatacaatgaataggaggggggatcgtcattgatggaaaagttgaaatctgtattgattattggagcaggagccaacgatgttcaacacggtgatgagctcgactctgctatttaccaggtctcacgcgtttttaagcaaatgaagataaaaacaatcttggcagatgataacccattttcagtaagcttagaaaatgttgaccacggttgtattgtcccactaaaagtcgaaagcctaatggatattattaataaatttcatcctgatgcaatcttacctacactgggaaatcgtcgggcttttgaacttacccaagaattgctagaaaaagggattattcgtaaagaaaatattcaattgctaggagtccctgaagcaactattcgtcaaattaatagtgcggttttacttgaaagaacccttcgtcaaatggaagcacctgttaaaaaaatcgtaacggttaataattatcaggatgctttggatgaggcaactaaactaggatatccagttattatccggtcggtattacctaagagtagcagtacacgtaaaatcgtgcatgatcgaagtgaattggcagatgcggtaaaggcttgcttgagccagtcgcgtgcggaacaggtagtagttcagcaaagtcttgctggctataaggaaattgaagtagtcgttcaacgtgatagttctggaacgatgatgatgttgtcaatgattgaggatatggacccaattggtatccatgctggtgattcgattgctttcaatcctgtccaaacacttcgcgatcggcagattcaggatattcgggatacggcttttgctattactcgcaaattaagaattgttggtacaaaccatattcagtttgccctggatacaaatagtgatcgtttttatgtcattaagagcagtccatactttgatcgaattacagcgtttgtgtcgcagtcaactggttacccaattgctcaagtaacagcacaattatatgcgggaaagcatctgcgggacattgatcttggcgaaaattatgttcatcatgcggctcttattgaaccaacgatggatcatattgctgcacgggttccaatatggggattcaacgatttaccaaaagctagtcgtttacttggaacagaaaaacggtcggtggggacggtttttggtatcggccgaagcactattgaagcactttttaaagctattgaatcccgttatcacgagccagctgactttcatcttgccgctcaaaagcaattgactgatgaccaattaatcgccaaaattgtccacccagaagcaggacgactttttgtattaattgaagcaatgcagagaggatattcagttaacgaattagcagagatgacaaagattgacccattttattttgaacagattaataaaatgcggttgttgattcgggaaattgctgagcatccaaataaagaaccggttttacaaaaagcaaagagttacggattaagcaatcagcttattgcaagactatggaaaactacctctgagcaagtttatcagatgagtttagaccatcaattgttgacaaagtacaaggaaatcgaaccatcggccggggagtttgatcaacatactaatagtttttattctgcttatgaagaagaaaatgaaattagccgaacttcccaaccaaatgcccttgtaattggaacggggggactacgtttaggattaagtaattctggtgattactttgttgctatgatgttaaaagagcttcataatgagggctttaataacgtcattgtaaattcgaatcctagttcagttacgtttaatccagagttagctgaaaagcgctatgttgagccagtaacgattgaaaatattttgcagatattacggatagagcaaccccagtatttgtttattcctgctagttatagtaaattattgaaatcattgcaaaattatgacttggatgtaaaaatcatcgtaattccagatgaattgccaactactgctgctagtagcgataggcaacgttactccttcaattatgtctatgatggtaattatgcttatccattaggaacaatgactgatcttttttcaccaattgcgttaaactatcaatccaccgctttacgctacccggctgatcttccttcgtcaacttaccaaaatctcaatgaccaggctagtgttgctgtgttaaagctggaacagccaggattataccaagtgatttttgaagagaatgatggtgaatttaatttaattaaagttcaaccattatcattgccagaagtagcctttttatcaaaagcacttcatattagcttaccaggaatttttactcaattattcactggtaaattcgataaaatgctggagcccaaaccggtatcagggattgttaactatcgtgcaaccttcccatttaaggcgttgcgagtcaaaggtggaatccctgcccgcaaccgagttattggtgctcagatgcaatttttaggagaataatttagagacgccgtttgtaaaattaagttagaaaaatagaaaagccatttgtggtagacttttgaatacccctaaacaaaagaaaggaaaccacaaatgacttacacccatcttaccacaaacgagctgacaatcatcgcccattctttcgtgcaaaagcttaaagcgtaccgagtggcccaaatgatcaaccgtagcgccgaaaccgtttatcgcgtttatcgttacctggaaaccggtgcctcaattgctgattatcaagatcactatatgcgcaataagcaacgttgtggccgaaaacgtactcagttgtcactggctgaacttacttatatcaacgacaaaattgcccaggggtggacgcctgacaccattattgggcgcgctgagcgcccaattagttgtaaccggcgaactctttaccggatgtttgaacgggggcagttcggtttggatgtccgtgctttgcccatgcgaggtaagcggcacccgaatggctatattgagcgccgcgggaaggctggccaattggggcgaagtattcacgagcgtgccaaggactttccgcactatgccactgaatttggacaccttgaagctgataccgtccaaggcaaaaagcaccaaggggcggtaatgaccctgaccgaacgccaatcgaaggtcgaaattgtactcaatgtgcacgaaaagacggctgatgcgattaaccaacacttaggtcagtggcttcggaaattcccgcagcacttcttcaaatcgattacctttgacaacggaaaagaattcgccggctggcgcgagattgccaatcaatttgaccttcacacttactttgccgaggttggtgctcccaatcaacgagggctgaacgaaaacaacaacggtcttttacgccgggacggcttaacaaaacagctagatttccgcaatcttcctgatgaattggtgacccaactgatgagtaagcgaaataacctgccccgcaaatcactaggctatcgaactccatatgaggtattcatgtcctacgtcactgatgagcaactactttctttctaacttaaattgacatttcgggagatataaaaaagaagtggaaaataacctcctcgacaaggcggttggctaagctaggacgatgattagcacggcacgggctgattatcgtccgtacttagactcaagccttgtggcgacgcaaagctagttccacgttatctttctattgttcataaaagcagttgaggctgggagaaaacaaaagttttttcccagcctctttttagttagaaagcttatgtggtgttacataaagtgttttctgacctgtaaaaataacaaatccaggtttagctccgtttggcttatgaagtcgcttaacagggagataatcaacgggcacgttatcggaatcgcgacctttagagaagtatgctgctaactgtgcagcttctagaatcgtatcttcagatgggtttgttgagcggattaccacgtgggaacctgggatatctttaacatgtaaccaaatttcatttttattagcaattttaaagctaagacgatcattttgtaggttatttttacctactaaaactgtagtgccatcactagtatgaaactcttctggggcacttaccttaacttttcgttgctttttcccacttttcttctttttaatataaccttgctcttgtaattctagtttaatctcttgaatatcagcaggagcagctaatttaatctgattttcaatgttttcaaagtatttgatttcatcatttgtcagttttagctgttcctttacatattcgacagaggttttaagcttattatacttagtgaagtacttttgggcgttacgcgatggtgataattctggagtaagcttgattttcagtggcttattatcatcataaaagttaggaagttcgatttctttcattcctggagttaatttactaagataggtagtaaggatctcaccacaaattcggtactgatctgcagttgctgcatcttgtaattgttgttgcagtttttttacttttcgccgatctttttttagctcattcttcaatacctttaacacttgcccagctaattctttggaacgatcttgctctgctttattagcataaaaggcatcgagaagggcagagagggagtcgaaatgttgcaactcaccatcaatatttaatggagggaacacagcaaattgagactttccattagagtgggtgattaatactggctctggattttcaaagtgcttaagaaagtgctgataggtagctggtaaattatcactttgcagtaattctgcagctaattcccgtgcggagtctttgccaaatccttgataatgcttctgtaactgatgacttaattctactgtgtcatcggtttgtcttacaagatcagagtagatctggtttggcaagtaagggttaactttatcttgctttggtggcatgacaaaggtagcaccaggtaataacaggcgaacccgattttgatctgagccaacatgcttaatggtgtcaatgattttacccgtcttgagattaacgagtgaaatattactatgccgggccataatctcactcacaagaactaattgttggctatctcctaattcatcacgagtgtcaaaggtaattttgataatccgatcattatcaacttgttcaattttattgacgattgcaccttcaaggtatttccgcatcgtcattgtaaaattagttggaaccgctggatttttgtatgggatctcagtaatttggattcgtgggtatgttggattagcagaaatgagtaatggatagttgtgccggtgagcacggatcataatgattaattctgcagggtaaggttgactaactttggctacccgaccagtagttaatttttgatctagctcatggacaattgcatgagtaaacaagccatcaaaagacattagtgtagcctcctaaatattataattacaaacgaaaatagcactattaattatacagttttacatcattaatgaaaagtaatgatgctttagtggacatatttttggttggtttagggccgtcaatgtggtatgctttttgtattatgtgggtgaaatccgcgtaaaaacgcaattatttttaattatggtagattgtaaaatttaagttgaacatattagtggacataaaaacccataaaggtctttaatggtgttaccacaacattccattagaaagaaggacctttatgggcaccactattttatcatttgaagaccgtgttgtcatcgaaactcttcgttatgaaaaccgctcccttaaatacatcgctgattaccttggcttcggtaaaaccacgatctttaatgaggttcatcgtttgactggtgaatatcacgcagttaaagctcaagctgatcatgaagctaaacttagtcatcgtgggcgtaaaaccatcttaacgactaacctcaagcgattaattgaagaaaagattaagatccaaaaatggtcgattgaacaagtggctcatgtagttagaatcgcctacaagaccatctacaactggattgatcaaggagtattggatattgacgtggctgatttacctgaccatggaattcgccgccgacgagccaaagaaccccgtgggacttttagccatggacgttccattgaagatcgtcctgctgaagttattgaccgtcatacctcaggtcgctttgaagcggatacagttttatctggaaagcgtaaaggtcaagcaatagctacgtttgtcgagcgtaagagtcgtcttatcatcgttaaacggcttcagggacgagatagtacctcaatgaccaaggccattttagaattagctaaccagttagaagataatctcaagacccttactgttgaccatgggaaagaattcgctaactacaagctaattgaagagcaggccaggattcccctctactttgcgcatgcttattctccacatgaacggggcagtaatgagaatcgcaaccgagtactacgacgctttatccttaaaagtcaaccgattgaggaaatcactgatgatgagttaattcaaattaactggtatttgaactccaggccactcaaatgtttaaactggcgcacaccaattgagatctttttgcgtaatctgcgtcactaactttgttcaagttatttcttgcaatctgccttatacaaatttagaacatggagttgataagatgaaaattgctgttgttactgacagcactgcctacctttctcctgaagaggcggcggctaataatattcatgttgtcccaatcccagtgacattggatggtcaaacataccgtgaaggtgtcgatatttccaccagtgatttttatgaaaagatggcaaattcaagctcttttccaacgacttctcaaacgccaatcggtcaattgatggaagtttaccaaggattagccgatgatgggtatgatgctgtgattagcattcatttaacacgggctattacaggatatttggatactgttgaacaacttgctgagcagatgaaggatacaatcaagatcgtaccaattgattcccacctaacagttaaaatgatggggtacttagccttagaagcagctaaattagctagtgaaggcgatgatttagatgacattgttaaaaaggtaaaggaatatcgtgatacctttaataatgtatttgtggttgatgacttgcaaaaccttgttcgtggtggtcgtttatcaaacgcctctgcatttgtaggctcaattttaaaaatcaaacctctcctgactatgcatactccaacgcatgccattgaagcgtttgaaaaggtgcggtcaatgaaaaaggctaaacttcgctgtgaacaaatctttgatgaggatattgccaaacttgactatccagttagagcgatggttgttcacgcaaatgctccagaagaaggccaaaagtggcttgataaacttcaagcggatcatcctgatatttcatttgagttgagttactttggtccagtaattggttcccacttaggacaaggagccctggccttagcatggatgcaagatacagcaaagaagcctttagcatgaaaaaacaaaccttaattaaaacccttttggcaattacggcgggtattttgatgatattaatatcatttactggctttcaaaccattttgccgaccggtaaggcgtttatgcctttagctggcgtgattgcagtgggaatagcagttgcattgggaattaatattgcatttattgtgacgcttgttagtgccataatcatgattgtcttaggaactgctgactgggtaatattagtcgattttattgttattttgattgtggttggcttgattttacgcagacaagttccattatctattgatctcaatcattcacaattattatggcttgctatttttaccggtctagttcaattattctttatttcaatcttttatggtctaattggattagtcctaacggggacgccaacaggtggattaacatttgttcaactgattattcctaatgcattactgacaggattattgtatggcttcctggtagcaccgatctcattgatttttcggtgggtagcgcgaaaagcattgcatattgataataatcataataatgattcaggtaactctgcaggcgataagcagggcggttcgattattgtcgacttaagaagtgctaaaaataaaaaagatgataagtaagcaaaatgccttggaaaaacattcaagttttccaaggcatttattatttctctaaataatttacatctttgcatcccattctgcatgaaattcatcaagaaagtcgagcatcacttgttgacggtgatttgcaattttcttggcagtttcagtgttcatcatgtcttttagatgtaagagtttttcatcaaagtgattaatgatagtttcatttgctaaattacgatattcttcccgggacatattatgacgaggcttaatagccggatcgtatattttttcatgatggccacctccataataaattgcccgcgtaatgccaattgcgccgattgcatctaaccagtcggcatcacggactatttgtccaatgatggagagcttgacttcctctttatctaaggtatgagcaaaagaaatattattaatgacatccataattattttgacttggtcatcactaaagtcattttgccttaagtaatcaactaattcttgtttagctgcctcaacgttgtcaactaatttctcatcaattgtatcgtgaaggtaggccgccacgatgggcaaaaagggatcaactttttcaccaattgctaatcgtttactcatttttactacgcggttaatatggtccatcccatgtccagtcttgtcctgacctaatttttgaatggtgtactctttaatggcagttaattgttccgcttgtttcatcataaaacctctattcttgattggttctttaattattaaatactgaatcgcaatccacgtcaacgttttgtagaataagatgtgaggggtggaataaaatgaatttattattttcaattaacgacaaatttgtcacgcaattagcaacagttttgttatcgatcaagttaaatactcatgcacaagaatttaatgtatatgtcttacaaaaggagaaattgaaacgaactgaagacttggaaagagtttgtaagcaattaggaatgaactattttccaatcaaagttaatgatcaattatttagcaaagcaccagttacagaccgctatccgacaacaatttattatcgtttactagcacactgtcttttacctcaagatttgcataaaattttatacttggatgctgatgtattgtgtattaatgatctttcaagtctgtatgagacttcattagagggatacctatatgcttctgccatccatacaaacctgacgaatacgacagaggttattaataagattcgtctgcaaaactttgatgctgacgggtattataattctggcgttctcttgatgaaccttgatactatccgtaaaaaagtaaaggatacggatatttttaactacatccgtacccatacacttttattacctgatcaagacgtcttgaatgccttatatggacgttatattaaatctttccctgatcaactatataattttgatactcgtaaaggcggtatttacgaaacgatttcctttggtgaatggacaaccgattgggtaatgcgtaataccgtgattctccattattgcgggcgagacaagccatggctgccaactaaaaatagtggtcgttacactgctttatacaaaaactactttcaaatgactaataaacttattagtgcaacattattactttccccagaagaaactgattaagattttattgacttgcggattatgatgaagtaattcgtgtttagcgtttagcccagtaatcttaacttcgcggtatgaacgtgcgcggttattaataagatatttaagagaaagacaggaagcgtttgaaacttggctatcgttgccatcttttaagtcaccgtaaatattcaataatttaatttgccgtgggtagcggtgacgtaagggaagtaatttttgataggaatcattcattgcggaaggttttcccgtctttttattcactattagattagcaggttcattccaaccgattgcaccatcaaaggctccagccatcgcaacttgtttttgaatttgtggaagattatggttgccggcattagcaagcagaaaatacataactgccatgtttcccatggagtgtgcttcaatatttacctttttaaaatgatatttagcttgcagttcttcaagaacgttcttaacccattgtccttgtaattcataatttgtgctatggttatcattgaaattgaccatcacgagcggattgacggcgttatgaggaatatctcctttaagagtaacggttccatcgccagcaacatctgcggtgataactgtctttgacacacttgctttcacaaaaccatttaccatatattcttctgcatgggcaccgcttccgtagccatggaaaaagagggtgggggtagtagaatgaatatatttatttgagagatctgcatgaactggatttgctgctagtccataaatgaatattaggaaaaatgcagtaaatattgttaaagtaaatttaataaatttgatcatatagaagccttctttttctttttagtgctatcatagcatattgaaggggcatcttttaatagttaacagttgtatttaaaacgtaaaatatgttacagtattagggttgctaaacgaataacacatctaattaatgtaatgagaagggaaggtaatacgatgcaaatcaaacaagccaaaatggatgatttaaatcaaattatggaaattctgcgagatggtcgaaaccaattagctgaacaagggatcgatcaatggcaaggagattacccgaacgaagaacatatcaaagaagatattgaaaaaggatttgcataccttgtacaatcacaagatgatgaaactgttggtgcattatcaattgttgaagcaccagatcactcatatgatgaacttgacggtgattggttaattgacactgatcgttatgttgttattcaccgtgtggcaattcactccaatcatgctggaaaaggatatgcctcagcattattcactagtgtaattgattacattaagaataatcggaaggatattaagactattcggatcgatactcatgaagacaacaagatcatgcaacacttgatcgacaaaaatggctttactaaagttggtgaacttcacggggtttaccgtccagaagaaaattcatatgtttacgccttattaacaggtaattaaacactaaaatagcgggagactagggattcctaatctctcgctattttttaaattaatttttgaaactatgaattggggcgggaataagtccaccacggttaatcattgcggtacttgcggctttattgactgccattacaggggcatatcctaatagaccaccgaattcaaccgtatcaccaacttttttgccgggtgcgggaatcacgcggacagcagtggttttattattaatcattccaatcgccgcttcatcagcaatcattgcgctaatggtttcttttggcgtgtcacctggaattgcaatcatatcaagaccaacggaacaaactgcagtcattgcttctaatttagagatatttagcgttccagcgttaactgccttaatcatgccagcatcttcagagacggggatgaatgcgcctgataaaccaccaacatgactgcaggccataataccgccttttttcacggcatcgtttaacatagctagagcagcggtggttccatgagttccaacctgagcaacgccgatttcttctagaacttcggcaacggaatcaccagcggcagcagttggtgcgagggaaaggtccacgatcccaaattgaacgcccagtctttcagctgcaacagttcctactaattgacccattcgtgtcactttaaaggcagttttcttgatcgtttcagcaacgacatccattgattcgcccttaactttttctagggcggttttgataactccaggtcctgaaacaccaacatttattactacatctggttcaccaacaccatgaaatccgcccgccatgaagggattatcttcaacagcattacaaaagataactagtttagcatttgtcatcatatcaagctttgaaccagcgacgactacttcacccatttgtgcaacggcatccatattgatcccgctacgagtagagccaacatttactgatgcacaaacaaaatcagtttccgccaatgcttcagggagggaagcgattaacgtacggtcaccagtttggtaccccttttgaaccagcgcactgtacccgccgataaaatcaatccctaatgttttggcagctttgtctaaggttttagcatatttaacatagtcgtggtcttgagaagcagcggcaatgagggaaataggagtaacagttactcgcttgttagcaattggaatcccatattcggcttcaatttgttggccgactttaacaaggttctttgcttttgtcgtaattttgtcatagatcttttgacatgcaaccgtactatcactatcgatacaatcaagcaaagaaattcccatcgtgattgtccgcacatcgaggttttcattagaaatcatgtggctggtttcataaatttgttgtgaattcattaagtgatattcctcctgtatatcttaaagattatgcatggcatcgtaaattttggcatttctaaggttaatttcaacgccaatctctttaccaagttctgtaagttcattagttaattgataactatcaagattttcagggatcatcacagacatcatcattacgaaattgccatccataattgtttgggaaacatctagaatattaatttgtttttgggcaagaagggcacttaccttagcgataattccaacttggtcttcacctagaacagatacaacagctttcattaaagaatcctctctttcttttaatgattttaattatagtataataatatgaacatttctagaaaattttagctaataaaaaaggcatcactcgtttagaggtgccctttatggtaaaagatatgaaattggttggatcaaaatgcgcccggcttaccaatatagtcatctacaccgtccggatttcctgaccacttgaacttatcataccagatagaatgcttttcttgatctaacttgtcgatttgcttcatttcatccggtgatagggtaaagtcaaaaatttcggcattttcttgcatacgttgaggatgagtagtcttggtaagaactataaagccttgctgaatttcccagcgaagaattacttgggcaggactctttttgtgctcgtctgcgatttgcttaataacatcattggaaagaagacgaccattacctagtggcgaccaggcttcaagctgaatattattttctcgacaaaactttacaatcttaggctggtgaatcaggggattgaattcaatttgattaattgctggtttaattttggcgtgatcgagcaaatcagtcattcgttcaacattaaaattgcaaacaccaattgattttgcttgaccgtccttgtaaatctcttctaacgcgcgccagctttcattgtatttatcattaactggccaatgaagaaggagaaggtcgacatagtttgtttgtaacttttttaattgctcattcactgcttgccgaagtttatcataatctccttgatcaccattgaaaattttagtggtaagaaagatgctatcacgttcacggccagtagccttgaaaccatcttgaatgccttgtccgacggctgcttcattcccatattgtttagcagtatcgattaagacgtaatcattcataacagcctctttaaccatttgctgtgtttccgcaagtgaggctttccagactcctaagccaagttgggggatgaggtgaccgttgtttaattttatctttggttgtagattttgattcattttaattaaattcccctttctaaatcagttataacattaaatactttaggatccttgaatttgctcgttaacaaactgaagaaatttttcgattgctggagataagatggtatttttgcgccaggcaaggacatcccctgtcgatttgttaggtacaaggggaacaaaaacaaggtcaggatcatgaaaattattatagacgcccttaattgtcagaccatagtaattactatttcttaaaagtgaaacggtatttccaggtaaactagttgtcgcacggatatttaaacgcgtttgatctaattttaagatatcactaacttcatcgcgaacaatactacattggggaagaattaagggaattttgtaaagatcttctttggtgatagtagaatacttggcaagtggggccgattttttcatcattactccccattcttcacggaccggtaattcgagaaagttatatttagcagcttcaacgggttcaaggaggcatacaaggtcattgagcccttcatctagttgacgccgaaggacatcgccatccccatcagataaattaaagattacgttcgggtaaagcttttgaaattcaaaaattattttcgttatataaggagagacactcgaaactgctgagccgagattaatttctcctgttaatgcctcttcttgttgatgaaggtcgttttcagtttgatccaagagttgtagcatggtcgttgctcgctgttgaaataagattccagcttttgtgagctgaaggcgccggttttctcggttaaacaactttatgtctaattcggtttctaggtccatgatttgccgggaaagggtaggctgggtaatatgtaattgttccgcagctttagtgatattattagtttgtgcaacagttaaaaagtattttaatacacgtgtatccatatggtatccctcatttttatttatattaaggagttattgataatggcaattttatattattcgcaattcggagacactgctagactcgctagtaagattcatgaagcaactggtgccgatattgtgagaattaaagttcccgatgatacttttccactggatatggaagaaactggaagaatttatcagcaacagcttaagacacatgccttccctaaactagtgaccaccttaccagacttatcgtattacgatttgattttagttggtggaccagtctggaatggcggagttgtctcaccaatcattgacttacttcaacaaattcaaaaattcactggtaagattgcgccgtttagtacaggttggagtaacactggtgattaccaagaggacttcatcaactatgctggtaagttaaatgtcactcccggctaccatattcttactcatggtagtccagctttcaatgaaaagtcattattttcatggttgcgaaaattataattcattttttgaataactcaccatttataataagatttttacattcttaatgctagagtttattattaaaccaacaattaattggatgttagtaataatggctaagaatgaatacgaaataaaaaatgacctttttggttttggtgataagaacgttgcatttgcaaaatactttattggaacaagttatctcaatgggttagtatctcctgatgataacattgatgtaaatgtttcaaacgttaattttgagcccggttgccgtaacaactggcatattcaccatgatggtttccaaatcttattagtaactgctggtgagggttggtatcaagaagaaggcaagccggcgcaattgttaaaacccggtgatgttgtagcaattcatgaaggtgtaaagcactggcatggagctactaaagatagttggttctctcatattgctattacgaagggaactagcgaatggtgcgaagaagtagatgacgctactcacagccgcctttctgattagttaattagtcagcttcctttgtcctcgtcctcaactttgatatactaggtaaagtttgaggaggagattacatggaaagctggctttttttagctttagtattattaattgcaatctttggtcataactcgtcattgattattgccacagtagtagtaatggttttgaaactgatcccttataccgccaagtggttgcccctgatacagcataaaggaattaattggggtgtaacagtgatttcagttgcgatcttgattccaattgcgacggggcaaattggttttgatgatttatgggcggcttttaagacccctgctggttggattgcagtcggcatgggtattgcagttgccatcttatcgaagtatggagtcaaccagttggcagctgttcctcaagtcacggttgccttagtacttggaacgattattggagtagttgcgtttaagggaattgctgccggtccagttatcgcgagtgggatgacctattgtattgtaacgctattgaatttgcatttttaaatagcaaaaaaccaagcgaggtcaaaagggatcttacttggtttttgttttacgcattttctaattgcgcttgcgaagaaattttatggtatagcttagtgctaaggtatagcgaagttaatagcaggcataagcatagaaggaagccggcttgaataccgaggtgtgaggacgggttgtgaactaagtgattaacaataccaacaattgaaacgatgagggcagttccaaaggcagccgcaatttgtcgtaacgtattaaaggtagcaactgcatcaggaacgatctcattaggtagcaatgataatgcttgtgtttgcagaggtattaacattgtcactaatccaaactggcgaattgtttggaaaagagtgatcatgaggacagaactacgcgcaccgattgcggcttgaccgattgttccgatgatatcgattatgagaccagtcccaacgagaatcttaattggataaatgtcataaaagcggccactcgttgtcgatagtaaacccgttaagattgcccccggaaggacagcgatggctgaaataaccgtacttttgcccaagacaatctgtacgagcaggggaatcaaaattgcattaccgtacattgttgatgtaattagcatattaataacagtggcaaaaacaaattgtttgtgggagaagatcctaaagttgattaactgacgcttactgtgacgttggttaagaaagaaaaggaagagaaagactaagccgataaggacataccctgcgacattaaatgaaagcaagtgactgttcgaaacatttgataagcccattaataatgaccataatccgcctgtgattaaaataagggccaatgtattaaagcggggatgttcattatgtgggattttaggaagcaggaagaatgaaagtagtaatgtaattactgcaaagggaataattaataggaaaaggtatcgccaagagaaaaagtgtaatagaaagccagaaatagcagggcctaagatgggggcacaattaaaggcaagaccaataattcccataatttgcccttttttacccggttttgcgtaacgaattgccaagacatttactagtggcatcatcattcctgcacccagagcttgaatcatccgagcaattacaactagattgaagctccacgcaatcgctccgataatagttcctagaagaaaaattccagagaaaataataaaaagatttttgaaagggaatctttttataaggaatgaactaacgggaatcattagggcattgacaagcatatacccgtttgttacccattgaacctgagcctcactgatatgaaagacattcataaaggttgggagagcaatgttcattaaggttgaacagagaagaccgaaaaatgtaccaaataccatgattactaatgcatggctgatgcgttgatttttcattagtagatatagcgctccttaaaattagtcaaacagtattgagtttactagccagattattaatgtcaatacacattaggaatttgcaagtaagtaaattaatgataaaatatagttacgaagaatttacatgtgtaaacgcaggaggaattagatgaatattaatttagaaataactcccgctgaatggcaaattatgcgggtagtttggagtctaaggcaaacgaccagtagccaaattattgaaattttacagaaaaaagttgactggaaaccggcaacgattaagactttacttcgacgcttggttgataaaaaagccttatctgccactcgtcaaggacgtggatttatctatgagcccttagttcccgaacagcaaacaatggaccaagcggcggacaacctatttaataatatttgtgaacgacacgttggaagcacccttgaacatgtgatcaataatgtaacccttagcaaggatgatattgctaagttacaagaattattggcaagcaaagcaactaattcgccggaccacgtcaaatgtaactgcattcctgatatgcagatgaactgctaatgaaaaggctccctgcaactaggaaatctttcctaaattgcggcgagcctttttaatatctatttttccttgctttgatcctcatcagctaatggcttcttctttctaggcttaatgtaaactaccttgaatttattaacataggcattcttcaaatcaagaggtgtgaatgagaaattatcgactctaattggttggccaacttttaagtcatactgccgttcaaggaaaaacccagttaaggttgttacttcagagttgtcaaattgctcgatgtttgtatcaaagtaacgttcaaaatcatctagtggcatcttacctgaaacttcgaaggtaggattacccttgctatcaggatccttcttttcaatcatatcagaggtagcatgatcaatttcttcgccaactgttccgaataattcttcataaatatccttatcagtaatgatcccagaagtaccaccgtattcgtcttggacaacgacaattggcacttgttttttcatcatctcagcaaggacattggtaagttgttcattttcgtaaacgattggaattcggcgcatgattgtgcgaactgattgttgcggattgatttggttttgccgcataatatcatatgcaaaaatataaccaagaatgtggtctttgtcattattagcaacaactggaaaacgcgtgaattttttttcgaaataaagtttagctgcatcttcaattgaagccgtaatatcaataaccgctaactgtgtccgatcaatcataatatcctcagcaactttatcattcatttcaaaagcccgttgcatgaagataacatcttctttatccatttccccagctttttccgattgttgggataaggtcataatttcattttgtgaatatgtgtcttcttctggctgaacattgtatcctaacattttcgtaattgccgcagcgactaccgcaaataaccaaacgaagggataaaaaacagtatggaagaattgtaccgggtgaacaattgataagagaattggtaccggtcgatcaatcgccatatttttcggaactaagtcagtaaataccgcgtggaagaatgtaaaaattaaaacaccgataactggtgcaatcgcttgaagaacatcgtgcggaataatattaatctttagcaatagatctgtgataaattcatcacctaaccaacctaaaactaaagaagtcatcgtaacaccgacttgagctgttgataggtactcattaagatttgctaccatgtgttccgcacgtttgacttttcgcgtttgccggagctcctttaactcactaggccgcactttaacaactgaatactccagcagtgtaaataaagcagctaacagcagaattaaaataatgataattaatttaaaccaatatgaatcccataaaccattcatcgtttaaaaatttcacctaaactttcttaaaaaatttatcgactactattgtatcagtaaaatgtagtgaaaggggagtttaattatttttttataagtgaaaatgctaaaataaaggaaaataagtaggagaagacacatgacgactaatgaagaagaaatcaagaagtcagcacgcttgcgtaagattatgcaagtgatgcgaaaatatcattttgttagcaatttttaccatcaaactaatccacaagctatttgtcaggcactgcaagaactgggaccgacctttattaaacttggtcaaatattatcaacccgtccagaccttgtctccccagcatatattaaagaacttcgccacttgcaagatcaggttaaagctgatagctttgcgaccgtagagcaaacttttgaagaagaaactgggaagaaaattaatgacgaatttgctagctttgcggaaaaaccttttgcttctgcgtcgattgggcaagttcaccatgcaacgcttaaggatgggacaccggttgttgtcaaagttcaacatccagaagtcggtaagcttgttaatactgatttagccttgttacggaaagcagtggtcttatttaagtatgttccccaagacattgcagtagttgatttggataaagtaattgatgaactcagtacttcattattaagtgaggtcaatactcttgaagaagcaaaaaatggggaagaattttatacattaaataatggtgacggacctatcttagttcctaaagtatatatgaagtattgtgctcctaagattcttgttaatgaagcgatggaaggggaaagcattcgatatcggtttaagcagccgaatgataatgatcaagaggcaacgaccgttaatcatgaaattgctactacgctcgttaataactttttaaaacaagtttttgttgatcattactttcatgcggatccgcatccaggaaatatattaattcacgaattacgtccggatgaatcagcaaagcaatacgcaacgaccaaacaccatgaaaagaccatttataatacaaccattagttatgatcaacaggaggcattaccaaattaccggatcatctaccttgattttggaatgatgggaaggttaagtccagcgatggcaaatagtattgcgaatattgtgattactatcaacacaaaggatacgcgaaaaattggaaaagcagttttaaatgtttgtaatcgaaccggggaagttgacgaaaatgcattttataaagaacttggcgcctttatgcaaccctatttttcaaccggccttggcaatattgatttcgtgaaaatgctataccaaattgtccagctatgtaagaaaaaccaccttcaaatgaggggagaggtaacgatgctaattaaggcatttggaactcttgaaaactcggttgctaaacttgatcctgaaatatcaatgcttgaggttgcccaatcgtttggccggcgttatttaaaacgaaactttaattggcgttctgcccttgataataacctagtcaattttttccttgctagcaaagcaatggggaagatgccagaaagaattaatgaattgatcgatacatttgtaagtggggatgccaaagttgatctacagtataaaaatgagcaacgagtgctaaagcagatagaacggttaatgaaccgtttcatgattgcaattattttagcagcagtcatcttaggatcatcattattagtccagggaacaccagctgattcacatatctatcgtttaggagtatctggctatattattgcaatcataattattattcttttagttgttacggagattatccatcgatggcgaaattggcgaagaaaacgatgattaatgatatatttaaacttagttgatgaattaatatgtgtgttatgctggggaattacgattaggcttattttgattcgtcatttaaatagtgaaaccaaggtggccagattcaatacgtttgcgtttgttttgatgttgctcaacttgatagtagtgttgcctatttttgcttttttgcttaaaaatttaccgattcaatcagtaagttggctaagttcattagtagtagcaactattgacgttttaagtacctttaacttaattttattttgtgttttcagttgttgtacccgcctgcgaaaatgtcctgctacggttcagggctttctggttttaggggcagctgttaaacatggccaagtcccgccagtgttagctactcgccttgataaagccattaattgttggaaaactcatcaatctgcaaaaattattgtttctgggggaatagtacagaaagcaaaagaatctgaagcagaagtcatggctgcttacttaattgctcacggaatcccagcaagaaaaataattcgcgaaaacaaggcacttaatacatggcaaaatttagccttcgctagtcaactcattaagccgcaagagacggttgtagtagtaactagtgattttcatgttcttcgtgcgagagcttatgcaaggaggatggggttaaactggtcattcattagtagcaagactccttggcgatactgtccattaacttttattcgtgactatctcgggattatccgtgaccattggtgggtattttgcggtagcacgctctttttacttttagttgaatttattttcccgaaatgtcaatttaagttagaaagaaagtagttgctcatcagtgacgtaggacatgaatacctcatatggagttcgatagcctagtgatttgcggggcaggttatttcgcttactcatcagttgggtcaccaattcatcaggaagattgcggaaatctagctgttttgttaagccgtcccggcgtaaaagaccgttgttgttttcgttcagccctcgttgattgggagcaccaacctcggcaaagtaagtgtgaaggtcaaattgattggcaatctcgcgccagccggcgaattcttttccgttgtcaaaggtaatcgatttgaagaagtgctgcgggaatttccgaagccactgacctaagtgttggttaatcgcatcagccgtcttttcgtgcacattgagtacaatttcgaccttcgattggcgttcggtcagggtcattaccgccccttggtgctttttgccttggacggtatcagcttcaaggtgtccaaattcagtggcatagtgcggaaagtccttggcacgctcgtgaatacttcgccccaattggccagccttcccgcggcgctcaatatagccattcgggtgccgcttacctcgcatgggcaaagcacggacatccaaaccgaactgcccccgttcaaacatccggtaaagagttcgccggttacaactaattgggcgctcagcgcgcccaataatggtgtcaggcgtccacccctgggcaattttgtcgttgatataagtaagttcagccagtgacaactgagtacgttttcggccacaacgttgcttattgcgcatatagtgatcttgataatcagcaattgaggcaccggtttccaggtaacgataaacgcgataaacggtttcggcgctacggttgatcatttgggccactcggtacgctttaagcttttgcacgaaagaatgggcgatgattgtcagctcgtttgtggtaagatgggtgtaagtcatttgtggtttcctttcttttgtttaggggtattcaaaagtctaccacaaatggcttttctatttttctaacttaattttacaaacggcgtttgaaaatgaaatatgagcgagacagaagtggaaaacaaccttctctcgctcatatttactttatttattcttatatactgcaatttcaatcagattattatctggatcataaacgtaaagcgaggtcatttcgccttccgccccttgttttacaattggtccagcaattatatcaatataatagctattaagatggtgaacaatatcgtcaatactatctccggcaactaaacataagtcagcagaaccaattgtcggatcagctgcctttaaagtagttggtcggtcaattttttgtaaacggattaactgatgcccacaccgcattgtaattaagtcgtcattactttgttctttaatcaccggcatatcaaatacttcgtgataaaagcgcattgattgctctaaatcagttacagttaaaacaacgtgatcaattcgtcgcattttcattatctaagtctcccttaaatttttaaatcaatatcattatacaagtttctaaattgaaatagcaaaagttgtataatgaaatgattgcagatctaaggagattttttatgaatataaaaacaataatgagtgtctcgattggcggcttcctcggcggaattacccgttatgaacttagtgtcctattaggcggcgatgggattttatatgccaaccttattggttcatttttgttagcttttataacttattattttattgagcggggactattagcagcatggctaaatgccgggataggaactggttttattggcgcttttacgacattttcaagtttagccacaactattgttaagcttgaaaaccaaggtataattgctagcatcggttattttcttgtgagctctcttggcggcttggctttggcactgctcggttttatgttggcacgaaaatacggaggttcgcggcaagatgattaatgtagggcttggagcagcaattggggctgtgatccgttatatcatcacaagctggtggaaaaagttaagaattgattggcccctagcaactctgtttattaatatcaccggtagttttttattaggcattcttaccaaaaattttgctagtaattcatcgctcatgctattatttgggattggcctattaggaggttacactactttttcgacttttaacgttgaactaatttcaatgatggatgaaaggcgatggggaatgttcgctgtttattttggcttaagttatcttggtggagttattgccaccatctgtggaatgatgatatgaaaggagtaaaaaatagtgacagaaaccagactaccaacgcaaattgaagtaaaaggtggaagagtccacaaccttaagaacattgatatcaatatccccctacataaatttgtcgcaatttcgggattatctggttctgggaaaagctcattagcgatggggattttatatgaagagggatctcgacgctacttagaagcgctttctacttacacaagacggcggataaagttaggtgctcaagccgatgttacaagtgttaaacatattccttcagcactagcattgaagcaacgtcccgcaattccatctgaacgagcaaccgttggaacaatgagtgagatgttgaacgtaattaggctgatcttttcgcggcttggcgaaccggtctgtccaaatgggcatcgtttaaaaccaagccttgaaatcgcagaggtaatgagtaagagcggcgatgaaatgggacaattaacctgtcctacttgcggcacaaagttttatgcctatggagcagaagactttgcattcaattctgacggagcctgcttacgatgtcatggaacaggaaaagttcgtgaactggatgaaagtaaacttattggggatgaaaatcttagtttagctgatggggcagttgcttcatggcatttgcctggacgaaactttatgccgagtgttgctgaacaggccggtgttcgaatccatgttccatataaagatttaacccctaaagaaaaagattttgttttaaatggtccacaaaagaagtttaagatggacttccgctctggaacaggccgtgtttttcatgactttaatgctttatatgagaacgctcatgaagcggtattagcatctgccaaaagcagtaaaagcgaacgagcacaaaaacgaattagcgaatttttccattattcaacgtgcccagtttgccatggaacacggttaaagccagaattattaaaacaattagctggtggtttaaatattgcgcaagttagtgaccttacgcttggagagttgagcaagtggaagcaagatgttttagctgctcttccttcagatatgaaaaagatggcgacctcattatttaaagagtttgatgataatttacgaccattactggaattaggccttgattatttaactttatcgcgaaacggaaatacgttatcgacaggtgaattacaacgtattcagcttgcaagaactcttcgaacccaaacaactggtgtcttatatattctggatgaaccttccatcggcttacatcctgataatattacaggcctcttaaatgtatttaaggaattagtggcccaaggtaattcattagtagttgttgatcacaatgttgatattatcaaagaagcagattggattattgaaatcggcccgggttctggagaaaaaggtggagaaattcttacggagggaacaccatcgcaaatcgctgacaaccctcagtctaaaattggtccttatttaaatgggacagcagtattaaaaagtcgccccatagcaaacgaaccagctagtcaagagattacctttgaagtaaaagattattacaatcttaaagacgtctatggagagattccggttaatcggctgactgctatcactggtttttcgggtgctggtaaaacaagtctgatccttgatagtttagttcctgctatccatgctcaagcaagtggggctaaattaccttcgcaagttcgaaaattgtcaagtccgttaaaagaagtagtaagtgttgatgcagcgccaatcggtaaaactaaccgttcaacagtcgcaacttataccagtattatggataatctgcggaagttatttgcagcccagcccttagccaaagagaaacactatacaccttcttacttttcttataataataagcagggagcatgtccaacgtgtgggggcgcgggggtcgtaactcttgatattcaattcttgccagatatgcaacagacttgtccaacatgtgggggaagtcgatacaatgaagaagttcaaaaagttaagtggcagggatattcaattgttgatctcttaaaattagatgttcgggcagcgatgagtgtatttaaggaagttccgaaaattgctcgtgaacttcaattattagatgaagtaggcctaggatacctgcacttaggcgaaagtacgcctagtctttctggcggtgaggcgcaacgcttaaaacttgttaaacaccttaatcataatcaaagtgaaacgttatttgtatttgatgaaccgactattggcttgcatccccttgatgttaaaacccttttagcggtaatgcagcaattacttgatcggggagcgacaatcattactattactcatgacttaaatttgattattaacgcagattatatgcttgatatgggtccgcgcggtggcagcaatggtggggaaattgtggctcagggtaatccgttagcccttattcaaaaaccagaaagtttaaccagcaagtatttggcagaatattggtcaagatttaattaaagataaaggctccaaacattcggatttgccggacgtttggagccttgtttttaatcaagttaattattttgttgctgctttttcttcatggttttgccagattttgcgaacgagtaaataacagccaattagaattaaaatagcgattgcgacaccgatcagtcgtctaatgttgcctttgaaaatagcatccccaccaaaggcatagagaaaggaggtcggtgccattcctacggttaccatcgccaagtagcgtttccaactcacatttaaacgggcaccagcgtagtttacaagtacactagggataaccggaatcataaagccgattgtaagtgcaattaacggatgcttttgctgcaagaggtaatgaaggatcttacttttctttacccgtttggagaggttaattttacgaattatactcattacagtagagtttcctaaaatgtttccaacccaattaatcagaaaaccaacaattggtccataacataacccagcaaagatacaaacaacggaattcgacattcccggaatcgcatttaggataccgattaaagctacaagaagaaagatatctgtaaaaccatgacttctaatcatatggagaagcttagccttattatgggcattaaagtctagtagtaggtcaatttctggcttatatgttcgataaatgaagtagagaacgatgacggcgaggataattgcgccaacgatcagccatgttttacttaatttacgctctttcatgattattgttcctcctttggtagcgtaaacccagccttctcaaaaagggaggtaagagaatgtcgtaaaagcggatcatgagcgtaaagataagttccatatacaccacgtttaaataaaacgttcaaagaattcataatcattcttttttctaaactcttaatttcagctggatcagttaggtcgtcacgttttttgaatgcttcaacatctgtataacgatctaaatttacttgaagttggtttgtttgaggtgtttggctaattggcggaccgataataatgccggtgtaatttaagtcaaacccttggcaggtgtagattgagccaacttcaccaatggtttgaggcaattctgcccagggggtgactgtatagttatattgatcccagggcattttaaatctgccttcctcaatgtaatgtttaccaccatcgagtgttgatggatatccagatgttgaaagaatgcgggaaagtcctacttctttattacgttgaacaattgctttcctcatttcctcagcatcactgtaaatgcgaaaatcataatgatcacgggcggatgctggtaaagcggttaatttatagttagtaaattcattaaaccacttaactaattcatcgctcgcattcatgcgaaacatgtgggtcaaatggtaatctttatggggatattggtttgtaattgcctgaagtcgttcaggggtccagagacttttcatccgtaagacttggtattgatcaaagacaattataacaactttagcacgtttaataatctcgacaagctgattatcatggtaaaaattattataatgatcgggtttggataataaaagatgagcttcatcaataacagcaacatcaatggtttggttttgcttatccaattgattaattaatgaagttggccgagcgaagtcctttttatataactcttttatcggcccagcaatctctttatagactttcagaatttctggatggttaacaagaaaataattattagtatgataaagaacggaattttgttgtgtccgcgcttctttttgaatgtgaacgaataattgtgataagattacgctttttccagtcccagcatctccgtagactgtatatattgcaggatgattttgtgttagatggtgtttagtaaatgaaataatatcattgacgagttgttcttgctctgtcgttaattttttaaatggtgaaattttgttagttgcagcgttgtctatatttttcataattatttcccttttaacgaattactctatttaatggtatcgaaatgcatgaatttcgtcaatttgaacttgagagtaatttactcaatgctttagaaagtgttagaataataagagcattaagtattactaattattaaatgtaaaatcaagaaggagtggaatagatgaatctgcatcctgattacctcttaaatgaagttaatgaaccaagcgatattaaggacatgtcacttgacgaattaaaacaattagcaacagaaatgcgtcaacttgttcttgaacgtgacgcaaaaattggtggacacgtgggccctaatcttggcgtaatggagctaacaattgcttttcactatgtctttgattcgccccatgataaagttatttgggatgtttcacaccagagctatgctcataaaatgctgacaggtcgaaagttaggttttcttgatccggatcattatgaagatattaccggatttacgtcaccagaagaaagcgctcatgacttttttgaaatcggccatacttcaacatcaatctcacttgcagtggggatggctcaagcgcgtgatttaatgaagccgcaatcacataataacgttatggcagtaattggggatggatccttaagtggcggattagcttttgaaggattaaacaatgctgctaagcttaattctaacttgattattctcgttaatgataatcaaatgtcaattgacgaaaatcaaggtggtctatacaagggactaaaagaactacgggataccaatggtgaatctcccaataatatttttaagtttatggggctcgattacaagtacgttgcagatggcaatgatttgcagacgatgatcgacacctttaaggaaatcaaggatattgatcatccaatcgtccttcatgttaacaccttaaaagggaaggggtatgagcctgctgttgaagaaaagatgaagtatcattggcgcactccatttgacttaaagactggtgaagataaggttaaagtaagtggagaatcatatagcgatgctgtccttgctgaattggataagcaaattgcagcggataagccagttgttgctattaatgctggaattcctggtgcgtttgatcttggcaagtttaaggctaagcacccggaccgttattatgatgttgggattgctgaacaggattcaattacgactgctgttgcaatggcgcaagcaggtgcacgccctgtcgtatttcaaaatagtactttcctgcaacgagcatatgatcaattaattcatgatatggcattaaatgatgctccggttgtaatgattgtgcgaggcgggtcaatttcagaaagctctgctactcatcaaggaacatttgatatttcaatgattagtgatttgccaaacattgaatatttagcaccaacaaacgtcgaagaaatgatttcgatgttacggtgggcaatcaatcaaactgatgaaccagtagtaattcgtcaaccagaaaagcctcttcttcacgggacgccaacacaagatgactacagtacgattaagtacgatattgctcatcgcggaagtgaggttgcaattatggctgttggtgacttctgggaacttggtgaaagggtaaggaaggaacttcaagacaagcttaacattgatgctacattgatcaatccaaagtctgtaactggaatcgattcagatgtccttcaccacctagcagaaaatcatgatgtagttgttacgctagaggatggggtccttagtgggggcttcggggaaacaattgctcgttactatggaccaaagggaatgaaagttttgaactttggagcaccacgggaatttgcggataatgttcctaccgaagtactatatgaatggtaccacttaacccctaaacaaattgtggatgatattgagcaggttatccattcactataagttaacagagctgtcatcgcaggtaaggattacttgtaggtgatagcttttttcgatttaaaaaatgcgaattgcttctctttacgtatatatattaaagagtatataaaagaggagcgagataatatgaaccatttaaaccaccttcgtgtattgcgaaacacttgcttagtaggcttaacgacagcgtcaacgatcctttcgctgtcgttaaatactccaccagttttagctacaactcaagagctaattacgcagcccgtatctaacgcaaataaccagaaggaatgtgtccaaatcaaacgtgtaatttattttcatctcttaaatgaagttaaaaaagtggaacaagtgtcttatgctcaccgtgaagtaccgaatgatccaaccaaaaaggcaatttggattattgaaccttttgaagaagttaatgtccctgaccaagccggttttagaccatcaatggataagattccaactgttacagaaatagaggatttatcacaattaaaaagcgcagtaaatgtttattatcagcccctcaataaagatgaagggccaaaaaaagacagcaaagagaatacgttagcagaaaagcaaaaggaggggcaagcaaaggagaataaaaaagaggaaaagcaagattcacaggacaattaccccatgaaagaaggtctgggggatgataatcaggtcacggaaaattatgaggaggtaaataatacaagaaagcagcaaaatgtgcaccaacggatagcaggtattaataatcgactaaatcgttcacatcgggattcacgtaaaaacgataattctgaccagcaaatacttccacagacaggaaatgagactgataatttaacgacttttcttggcttgggaataacggtaacggtcgcggggatgagtcttttttcgctaaatagagcgcacaaaaagaaataaaacaaaaaaacttgataaaaggacttgcatttttaattttctaatagtattctaatgttattgaaaaacgaaatggaggaaactaaaatgcaaatttacaataaatcgattattcatcacctaacctccacctcaaccacaacaacaattaccgtggttgagtagttttaatatctcttaaatctgttagcaatagctattcaagatgtctcaaccacttatcaaaaattgacaagggttggctagggacattttgggtagcttttttatttaaagtgaggttagaatgatggataatcagaaaaatgaagttaaattaaatcggacaatgactcccggacaaatggaaatgattgcaattggtgggacaattggtagtggtcttttcatgggagccacatcaactattaaatggactggtccttctgtcctattagcatatgcctttgtaggtttagtcctgtatggtgttatgcgtgcgttaggggaaatgatctatatcagtccaggaactggttcctttgcggactatgggtctaaatatattcatcccttagctggatacctgacaaagtggagtaatgtctttcagtttatcattgttggtatctcggatattatcgccatgagtcaataccttaattattggtggcctaacttgccagactggatttctgggttagtaatgatcattatcttaactcttgcgaaccttgcatctgctaaggcatatggccggttggaattctggtttgcgatgattaaagttgttacaattattgttatgatcattcttggattgttagtaattgtccttgggttgggtaacaattggcatccggttggaatttccaatttatggtcacatggtggattctttactggtggattcatgggattcatgttctcactatctgtgattgctggatcctatcaaggaattgaattacttggtattactgctggtgaagcggcctcaccacgccatgcaattgttaagtcagttaaatctgttatttggcggattttaattttctatattggggcaattttcgttatcgtttccatttatccatgggacgaattaaaagcagttggatcaccattcgttgagacatttactaaagttggtattactggagcagctggaatcattaactttgttgttttgactgctgcattgtccggtgccaactcaggaatctatagtgctagtcggatgcttttcaagctttcagttggtggtgaggttcctaaggtctttagtaaattgtcaaagcgggttgtaccaaatgttgcgatcttaacaatttcattctggattttccttggctttattgttaacatgcttctatcaatgtttaatgcagcctctgctaatatcttcgtgattgtatatagttcaagtgtccttcccggaatggtaccatggtttattattttgatttcagaattaaacttccggcgtaataatccggctgaattaaaggatcacccattcaagatgccattttatccagcatataactactttagcttgattgcgctaagtgttatcttactatttatgttctttaacccagatacacggatttcagtcagtgttggggcagtcttcttagttattatgagcattatctacaagttaagaactcagcgccaagataaattagcataaagaataagtactctcgaaacagattgttttgggagtattttcttttatcaattaaaatgataaaatacttttacgaacatacgtttaagaggaaaggtattttagaaacatgcgatttcgattcaataaaaagactcagtatttacttttagctttagtagcagttctcggcattggtagtttttcccagccatctgacaagggaagtaccttaccacagggaatccaacgggtagcatcttggcgccattccagcaataataatcgatcatcttcttttacgccgccaacccaagagcaggctacgggtgttctttctaatggtgtccgtcagcagttaggaacatctgacataaaatggaatggttacggagcgtttattttaaataacaatcagacggcactaaacgcaaatattaataatgcgccatacgctgttaatcgacgtgattcgcgtggacgagcatggcagggagacgcctggctcaatcgtacaacacgccaataccgtaatcggaatgaaactgggaatggagccactaattggaagccagctggatttttacaagcccataacttaaaaggtggtatctcacatgcttatgatcgcggacacttactaggatatgcattagtaggtggtatccgtggttttgatgcttcagagtcaaatcccgctaatattgcaactcaaactgcttgggccaacgaagctcgaagcagtacatcaaccgggcagaactactatgaaggcttagtgcgaaaagctctggatcaaaataaacaagttcgttatcgggtaactgacgtatatgatggtaataatttagtgccttcgggtgcccatattgaggccaagtcaaaggatggcagtttgcaatacaatgtattcgtgcccaatgtgcaaaacaatattagtataaattatgcaacaggggcagtaacgcaagtgaacacgaattaaaaaactatgtaattagaataatccctcaatacttcatttgattaaagtattgggggttctttatcatctgcatataaaactagcgtagaaacaaaatatttcgatggtcacttgcaaaattggtttaaataaacgaaaataaaaagagttaatattgtttagaaaaggactacgccaatgacagatttagatctaaaaaagattcatattgtttttaatggtcaggatactccaccattaaagattagccagctttttgatgctaataagttcaatcgtttaacagcagttactggtaacgtgactgccgactttattaatcagtatctaagtcgattcattaaagtcgaagttgcactgagcagccctgaaaattatgaagctaaaactggtgatgaagtgatcactaaggtagctttaaccaatgcattgctatctgctgctaataaaaagcctgctaaagtctttgaagcattaactagtgacaatcaagcaaatgtgttgaacaatctttttcaagttgcaattgcaccaactcaggctatccattcacgtttttacctcctaagtaattccgagactcatgatactcgtgtgattttgggaagtcttaacttggacagtgcttcatttgataaagagcgtaaccaatatgaagaaatattagtctttgatgatgacattcggctatttcaaaatcttgataaccactataagaatgacatcaagccagtattacgaccattttttactgaaaatcttttaaatgcagcacaaaatcaaattgatgagagcttgaaagatactaaaggaactaagaatgcggttgtaattcttgataatgaagttaccgatcaaatcgcagcggcagatatgaccgacttgattagtcatgacgttcaaaaacaaattgatgaaaataaaattcccgcaatgattactaagtcgatgcgagatattacgactaaccgctctcaagataaagaagaagcagaacgacaaattcaacaacacgatacaatttacactttgcaaaaaacagctgtatcgccacgagcagctaagccaaaattgaaatcgcgcgaaaagatttttaaacaagttcaggatgcattgattagcggtatgacaccacaacaacggtcagcagagaagaagtatacaacgttcttatatgatcgtccgatggaaagaaatctggttaacaataatagtggcctgtacgtaccgaatgatacaggcacgcacccaattcaatttggaaagattgcgactattagtcaaattcgtgatggcttaaagagtattgatgcagtattaaaagggtatcagcaatacgttgttgactacaatgatgattatggtaagcgattctatgaagctattttatatagttttacggcaccatttttatgggaaattcgtgcgaaagctagtttgaatcctgaagatgggaatgatattcctaacttcttgattctaggagcaactgctggttctggaaagtcaaccctattacggattattaatcaattgacatggaacactgatcggtcattaattgattttgggactatctatcctacagatacaccgcagaaaaaagcaaaaactgttgatgcaattgagcactacatgaagcttggaagttcataccccgttttaatggatgagattgaaccatactttttccaacaagatcaatatagtcggcacttagttgttgatacgatgaatgaattggtcaacaatccacatgcaattgcgccattaatcggaacaactaactatgattctggttttactatgctacgtgaaactgcacggcgaacttattatctccaaattgataaggttatcgatgaccagcaaaaaggtgaagccaataaatatatctataatgtacgacaaaccttaaataatacgctgtttaaggactttgtaatgcggatggcaagcttactagaggacgatgaaacgccatggcgcgcattcgatgaaaagactggtaagcttgacttcttagcaaatacccgtaagattttccgcgattactatcaaatggcggatatggaagtacctccttactttgcggatgaaatctgtgatgactttaaggaaagttcgcgtaaccggtgggctaaactttacctaacacaggaagaagactttaaataccggcaacaagatcatagcttgttatttgatatctcgaagcttaatactttcaatggttttactgccgatagtattgaaaagtaccggaatgcactgccaattgaactctgtgtggatggtatcaatggcaagcgtggcaaatttgtggaaattaaagctgatgaattctttaaatggattggtgaacgcaacccatatgctgaagatactgcggaaaacgaagcaaataatgaagaaacgttaactacgaatacagctgaaaaagttacggaatcgcctgttaaagaacaaaagaagggattctgggcacgattatttggctaatataaaaaggtctgggacgcaaatagcattcaagacctttttatttactattaattttttgtgccttttgtttcggataatgtttcagattttcaagccgatttaccaagggttttgcatattttatgtagagtggattacgaaggagccagttatgaaaacgtggtgaaattttagtgatacaccatattgtgaggaggaagaatggaacctgcggaattacagggaggagcatcccaattatcccaccaacgaatgaaatgctccctaacaagatccatccaagttttaatactaattttaagatcattaaaagttcctcctttctttcatactatcgttattattattctatcatgagcgtatgaaaaaagggtggggagctgcttaagtttttattacatttaagttaaggagagaaataaattgacattttatacaattagctatttatcaaaccaccaacatatgaatcaactattcaattatattgctattatcatctttatccttctgattgcagtaatggcatttttatatttacggcatcgccttattacccgttatcgtgatttaggaataattttctttttgctattgttactttttattggttttcaagttaccgatatggaaaaaagtaccacacagcaatcccaaacaactcagatgattccctttattaaggcagttgctcgggatcataatgtttctccacaaaaagtagttgttaattccacaactttaacggatggaattcttgttcgaattgaggatcgggattaccgtgtcaatttaagtcaaacgagagataattatacccttacacgagcacatgttgttaatcatcaggttaatttaatgaagtaggagagaagaatggatacttattcgttaatcattataaagtttgtccttggtatgctatgtttgattctgcagattaatttattggggaaagggaatcttgcgccaacatccgccattgatcaagttcaaaattatgttttaggtggtattattggcggaattatctacaatagtgatatttctgttcttgagtttataatggtccttttgatttggacattaattgtatttattgtgaaatttgctaaagatcataatatttgggtaagaagaattatcgatgggcgcccgcaaatattaattcagaacggaaaattattagtagagaattgtatgcgtgcaggaatcagtgctaatgaccttatgttccgtcttcgtggtcacggaatttatgaagttgctaaggtcaagagtggaattttagaacaaaatggtcaacttgtaatcatcgaaaatgatgaagcaaatgttcgcttcccactaattaatgatggacagatcaatattgacgtaatggaattgatccatcatgatgaacagtgggtatttgaacaaatccataaagcaggatatggcagtgttgatgatatctatcttggcgaatatattaatggcaaattaactttaataccatatccaaaagcttaaaagaccatcctctttataattttcaagcgtataataagagtaaaatacaaaatgaaatgataagaagatgatttgatgaaaaaatctttaaaaattgccggaattagtattggtagcctaattcttcttgcttttggtattcagggtttcttactacgaggaacacctggacaacccttatcaccacaaaattaccaagataaaatagagtattcttctgttcctacgttacttattcctggttggggcggaagtacggttacttataataagatgattaagtactatcagcagaaaaacattgcacaaaaagttttaatgatctgggttgcccctaacagacgtatctggactgaaggagactttcatgggcaaaagaatgccttaattcaagttttatttgcttggaactataatggtacttaccatccacaaatcaagcaactgacgactgttttgaactatttgcagaaacactaccatatgcagaaaattaatgttgttgcccactcatatggaggcacagaattcattcatgcttatatgggttcaaaatatcttcaagatcatatgcggttaaataaagtagtctttttaggggtaccagttgaagaaagtcttagcgatcagttaaaatatcgctatcatttagttaataaatcgacagacaagaattttcaccaattatttttagagatgaaaaattggcaattaaattatccagttgaaatttataatttaatgggtagtgaagaaggcagtaaaacaactgatggagctgttcctcatatccaatcggaaatgttaaaatcattaattaaagttcatccatcgattaggtatcatcaaaaagtatatccaaaaactactcattttcaattacatcgccgcacaaaaattttaaacaatatcgctaacattttatggggaaggaattaaaatgaataaagaacatggtcaagtaacaggaattatatggcgtgggccggatgacttagctatataccaacaattaaaagagtatgcagataaaaaaggtatttcagtttcaaaggcagccaagcaattaattaacacagctctcagaaaagattaaaaaatcctaattggttaagtttattattccatgatagaatcttaaatgtacaaaaattaaaggggagttcacttaatgacaaatcaaaaaagtaagacagtatatttctgtgccgggtggtttactgacaagcaaaataaagcttatgaggatgcaatgaatgcaattaaggataaccctacagtagatgtagagaattcttatgtgccattacaacaccaatataaaggattacgtgttgatgaacatccagagcttttgcaagatcgcgaatggagtacagcaacttacaatggtgatcgagtaggtgtttcaacttctgatatgcttttagcagtctacattcctgaagaagaagatgtaggaatgggtgttgaattaggaatggcacgcgcactaggtaaatatattatggtagtgattcctgatgaagactttggtaaaccaattaatttaatgagttggggaattgcagataatttcattaaaatgtcggaacttcctaattacgattttaataaaccatcttacaatttctacgatggtggagtatattaagaaaaaaagatgtgcgatttcaactcgcacatctttttttgaatactagtttacataatatctttaacggttaataaattgatattcaatctctgataatagaccagtatgattattatcgtatcttgtaactttatcagcaacttttagtaggtcatcagtagcatttttcattgcatatccataaccaacttctgataacatctcaatatcgtttgaagtatctccaaaagcaactacttgatctagagttccgttcaagtaattttcaactagtctttttaatcccaaggctttatttacgcctgccggcaggatatcaatgccataagctccactataagtcgcttgaattaagtttggaaactgctcatttaattgatttacatatccttggataatagtttgggataatttgcgtttggcccaaccaatgtttaagttataaattggctcaatgattttttgaaggtcagaaaaatatgtgtggtggggataaaaagggactggaacatcgcgatactgctcggcaaggattgtttgtgtttcgccagataaagataggatgtcagggctagggaacgtatgcttaataaaagcataaagttgttgcaacgtcgcaattgaatgagtcttgccgtatacagatttgccgtttattatcagtcgtccgccattttctgctacaaattctgttacaagtgggcacggttgaaagatcgttgacaatgcatcgtaactattcccacttgcaataataaagtgatagttttgtcgttgtaatagttcaatatctttatttaaacggttaacgtcgaatttatcattatcatctagtaaggtgccatcaacatcgatcgcaataaaacggtattttcccatttgatttcctctctgaaatattaatttgtagaagaatcttgtggcttttctacagtagttttacttttaagttgttgccttaactgtgtattttctttttgcagttggtcaatctttttttgatacttttttaattcgtccttactaacacgcgatgattgtaattcttttaattgcttattagttttgaggtgattagaaaatgatagcaagtaaataataatagccccaataagtaaacagataaagattagcagcactagtggcatttttacttgtgctccaaaaagattgactactacagttgccgtatttaatagtgcaaagatagcgattatgatcagaataacgattgaagcaatggttgtagattgctttttcatggaaaattccccctcatgttttatgtaacatatctattatattaacttaagaaatgctggtaaaggagaagggggaataaataagcgtcatatgtatttgtatttttaaataaaattgacaaattctctttatttttttaataaatgcgctaaaataggaatataaggcgtccttagtgtaatggatagcacatgagatttcggtcctcatgatccgagttcgactctcgggggacgcatttttgagaaaatatgatgaagtataaaaatcctacaatcgttgttatatcaatgattgtaggattttttagtattttagaaaagtatggaaaaatattaaaaagtacaaagtcggtacacctttggtacactagtgtaccaaactaaagttggttcaaagcattgacaatcttgtcatcagtttttcctttgtattcatctattaaataagcgtaagtattcattgttgtacggatgtcactatgaccaagacgtttgctgattggatatatatccacacctttagcaagaagtagggcaacgtggctgtgccgcaaactgtggaagtgaaaatttttgcgttgaatacctaattcatctaacaattgtcgaagcattttattgactgcgttgctagtaggaatagtaccaaactgagtcataaataccatattactaatatgcttttccttcaattgagaaagcaattgtagaagagtttgatttactttgatagtccgattagacgatttatttttagttggcttgaaagaatgagtgtacatattccaggacttgctaacagtaatggtttggtgtagccaattaatatcattccatgttaatgcttgaatctcagatagtcgcattccagtataaatggctgtgataatcatataacgactggtataaatatcttgctgactgatctcagcttcagctttttctagcagttttttaatttcttctacatttaaataatcaacttttacttctttatcctcattagctaccagtgtaacgttttgagtaaagtccttaatcagataatcatctaacatcgctgaccggacacaagcgcgaacaatgttatttacttctttgacagtatgtggggcgtgagtagctccatactcattaataaatctttgatacattttgcgatcgatatgtttgaattcagtatcagcaaagaagctatttaatgcctttcgagtaaattcataacgcttataagtaatttcagctactttaggtttcttatacgtctcaatccattgatcgtaataatcaataaatttgatagttttcttaatgttgattcctttgtttagtttggctttttgttcaactgcccaatttttagctaatactttagtaggaaaaccgccttgacttttagtttgtcgttttccttcactgtcataccatgaaattcgagcttgccattttccataacgttttattattgaagccatacttgtccctccattattaaattgtgtataatgaaagggttgaattgagacctgtaaatcttattcaaccctggtccatctcctatgccagtaggggatgggcttttttcatttgtcagctttttacgtcatcaggctttggacgattcttagaaatcaagtattaatttaatgatataataattataaattcgctgaatcaaaggaagtatataatatgaaattatataaagtagttaaaaaaaacataccagttgaagcctatcaaacaaagaagccaatagatattcgaacgcttgaaggagtaatgcatgctaatgcaggagattggattgttacgggtgttgaaggagagcagtggccagtaaaaaaagaaatatttgaaaaaacatatcgtattatttcggaaaaacagtaatcttttttcttacaggagctgatcttttatcaaaggctgcatcaatatataagtttggtgaattaataaagtcttcccacttaactaaaatacaatatctgtcatcaattccccaagcgcaaccttcatgatcaggaatatagtaatttgtactaaattctttaataactgtattatcatcgatagcaacataattatgttcttgtccacatgtctcgcaagtataagtgcctttgtaaattttatcggtcatttctggaagaactattccgagaataccattgggatcattatataagcttgcctgtatttctcgtttaatataatgttgattttcgtatagattattttccgcactatgttttccaattaaacatatagtgactgttgaatcttttaaataatcttctcgtatcttccgcattatgtattcttcattttcagaattaattggttcattaagagatttatcaatcatatcgacatctaagtcattttgaatggtttctttatacaaaatatcttctggtttaaatgagataaagcatttatgtttcattaaatagattttcctttcttctttcctaaggaggcccaattggtgttttcattagagataatatattctgttcgatccactaaagtatgaaatttttcatcatcgtttagttcagaataagcacctgaagatgttagataagaatattcttcacgttttaaggcttctgcatttgaacgatatgcaatccatttttcatgccatttagttaatgtcagaataccttctgtaacagtagcaattgcagctattaaagcagtaactataacagtgaatgattggtgcctaaatgctactgatataacagggatggaggctgtacaaattagagtaactacttttgaccagtaatagcatttcttttgagtagcactttttttatcgtaccaatttatttgatcatccaatctattttttatatattcatccggttttaaattcaacggggacacttccttcaaatttttcgtattttttgtatatatacggtggttacttaaatcactcatagaaaaagtatagatatcatcgtttgtattatctgatgacgaatctaataatttagcactgattgttgtatcatctattctatgtaggaattgaaactctttatcattatatttgaactttacaattacacttttggcttgtttatgcgcgataatagtaattattattaatgcaattgaatatacagaaagtaagataattattggtcgtcgtatttccgcatcaactacaattgaaaaaatagtaagaatataggctaaaattgtaattgctataattgaaactataatatagaattgattttttatactcaataatcttttttctaaataatttaaattcataataatatagccataatatagtagtgatatgattatcgagccaactgctattatagacgttatattgattgaagtatttttatttgttctcttagcttgatgattagcttttgttgtagttactgttttattttgattaataattgaatttgcagatacacacggagaattacagttaccatcaacaatcgaaaaactaaaaagcacaataattaaaagaaacagccgtttcatgcttattcgtcactcccatcagtcacaacatcataaacagtgttaccatctaaagcttcgtataaaaccttgtcatgattttgcggattaacgatggctaatgcgacctttgcgccatacttgctaaccatttgagatgaaacatcgttgattgaatcggttagcttattccaagtttcttcatccccgtccccgtttgcaacgtcaacaacctcgtcagtgaattcactgtcagaagggatgattaaaattgctttgctgtctttatcatatgaaactatagctttatccttaaattgactttggatcattgaaactacttgatcaacgttcgagtcactagctgaacttgtttctgtactactttcagactcgtcatcagaagaatcgtcaacatcatcgtcttctgtactatctgttgaactatcgtcactgctaggatcagcatactcagatgagtcagggtcattttgctgagcatggtatataaatattgcagttcctcctataagtagtaaaacagctaaaattgcataaatgattctattaaacttcaattcactattttgattattctttttcaattatttatcccccaaagtcctaaagaattagaaatagaattataattataatcactggtattgtaactagtagagtaataagacacccgcaaccagccatactatctccagcagattgcattgtattacctattttttctgctttttgactggcttgataccatttgttttgttctaacatttgctgagctgttgtgtcattaatatatgtaacatcttttggcttttcatttttcagaaaatcaatttgaaaagtatatggttctcgaaaacttttaatgtgatcggcaccatctttatcaattattactttcttataacgcccacctaaaacatagattcggggttcgtagttatcatcattaaggcgattaataagtttgccatcgtccttgatggtcccgatattaaatcccttaccgtttcgaaagctaagataaaccctatagtggccgtcagtattactaattgaagtttttatatcatatgagtctaaaggatgtgttccaaattgataaactttttcatcgtaatgatattcaagaatgtcttgattagaaagaccatcatataattcatctttatcgaaccattctcgtaactcagatataaacttcttaatctggttatcatgacctgtagtatcgacagtatacatacatatcccccaacattatcgcagcttttaacgtcaatcagtatttggacgtaaattattatttaatactccatgaaacgtgaacagccttaccaacaattcggcctggattatctttatctaagataattgggtcgaattctttattatctggcattagcataattagatttccttggtgcttaacacgtttcagagttgcttcattatcaccatcaacaaggacagcggcgatttcaccgtcttccactgtgggttgttctctaatggttacaattgatccgtcgtgaatggttggttccatgcttttacctttgcaacgtagagcaaagaggttgccttttggaacaggcttttcaaaaatctcttcaacgtagccctcaatattttcctcggctgtgatcggatcaccacaggcaatttcaccaatgagggggatgctgatgcgctcaaaattatctcccagcgggtaaacgatgttagttggcaagttagtttcagaagtaacttttctttcctgtttaacgtcatagcccattagccagccttcatcaacgtttaagacttgtgctagggcatgaagtttatcttgtttagcttcatattttccttttagatagtcactgattgaatttcggccaatattagctcgtctcgctaattcggcttgagatagtcctgagctatctaatgcttcttttaatctattttgaaaagtgttcatattttttaacacccctttattgtattttagcacagatttatggacgcgcattatctaatgttcaaaaaaatgtacaacttatcttgactccgtgacagattgagatataatatagttgttcagaaaaatgaacaaaaaaacagaagggagtgtgtccatgagcaaatatgactattcattattagaaaagcgtatgcgggaaaagaatatgtcacaagcggctcttgcagaagctattagtatgagtcgaactgctttgaatattaagcttaacaatcatagttcgtttacccaaaaggaaattaaggcaattagtgcggttctatcaattcctgatgctaaaattagcacttatttttttaaagaatatgtacagaaaactgtactaggagggtagcaatggtgagcgagcaaaataaaaaagccacccaagggaggtgactaagtgcttaatttgctattgattttctttcttatttttgtgttttgcccgcttttgatgagcgtttctctttatgtcaacaagaagattttgaaagtcgtttgggataagaaattggaatatcaagcaaaacgagataagtgtcgcaagtaactgaaactggtcagctgtttctgtatagagcatggatactaccaaggagataagaattcctaatctatacaatctatttgttaacttttctgaaagtttatagttgctgatggaaattgatataacttcaatcaatatgacaaataaattccaaactaggtagattgggagcatcgcaattatcgttataagcaaatttgagtgttcaatttcataaagtgcagaacctttgctagcagttgaatacacttgggctacggaataagagccagttagtagcaaaactaagcagcaaaacaatgcaccaattctgacaagaaaacgtaatagtattcgtttgagtgccttgatgtaatcacctcctttcatagggagatgaattaagtatagcaaaatagaagaaagagagtagcttttgacagttgaagcataaaacttctagaaggaggagggcaatgatggatgaagaagaaaaagaaaaaagccctgctgctattggtgttagcagtgggactatcaaaactaatcgatttcattttagatgaagtttatcagccagttgatctatccgatctttcaaattcactttgatggcagtaatgaagaatagaaaaagccacctcgaaaggagatgactaatatggattggcaaagttttgctgatggattaattgtttcttcgatagtttgggcaatcgcttatgttattaccattacaaaattatgattatttaatggtttttatgattccagcggctgcattttttatagcacttgcttctttagagtcggaacctgtagtaacagaactccacaacatttttgacatcatatcagttttgatatggaacgtatctctatattctttaccgttggaatcagcataagtgacacttaatttgattggaaccttgtaattatcttttagcgacattgttaatttttgctttggaccgatgcttccattaattagtccgtttaatccttcttggatatcttgggagtacttattacttttatccaattcaataaagttaattgttttaataattgcactgctatttccaaagttcttaattacaagatatttactgaagtagacagtatcaattgcttcaagataaatagaaatatacggacgactggcaagttgagcagctacctttgtttgataggctgaccaacaggctattcctaaagaaactagaataccaactacagagatccagttagttaatgtcattataaataccacctttcttaatgatttagcagtcgtttgaatagagtgctaagtgtacgaggccaagtatatcgaaaatatgtttcggtgtcaatatattgtattaatcagagagatgtatcacaagatgttgtgggatgaagtcgaaaaagaacttaaaaagcaaaatatgagtatttaccagttaactattaaagcagggttaccacgttctaataggactatgtatgagtttaagtacggtcatattaagaagccaagttttgaactgatgtgtaagattgctgatgcgttgaatgttagtttagacgtttttagataactacttgctggcacaggtggttatccgtaattaagaagatttacaggtctcatcgttataaataaggtaggtgattactgatggaagcaaccttagatgaacaagattaccaaacaattactaatgaagtgctcaaacgtattaaggaacagtatgatttggtgcctaaacaatataaaccaatgttaattagtcttaaagaatttcgtcataagtatggtcatgataagtcgccagcttggttaaagttgtacttgttgcccaagatgccaggcgtctatggattgaacgctggaaaaggccatccagtacgaattgatgtgggaaaggctacacgctggttagcacaacatgaagataaagttgactggaataaatcattaccgcaataagaggtgattaagtggcatttctaattggattaccaatattaattattgcaatgtgtttgttatatgcactggtgtacagcttgctgtatgagcggaacaaaccattgctgctgaaagaaaaatatcagaagaaacattaaaaagaggtgaaacaaatgacgttaacaaaaatagttaattcgaagctcttagcaatgctgatgggtgcttggattgcttattgtgtaggcgttggcgactatggtggagcagtattcttgctgttcttctattcactaatgctatgggacttgcacacaaaaaaagccaccggcgctggtaacaccgatggcaaaatccaataactggataagaaatctacaaggagattataacatatgtcagaaaaagatactgcagcagaagttgaaaaacttgctaacaatgtgattgatcaagctatttttatttgtaatttatgcgatcaatttaagcatgcagaaacgtacagccatcatatgaagttagcagaagatattgcttaccaccttaagcggctaagcgaatctcaagactttgatgaattagttaagcagatttataactagggggttacacaatggcacaacgcagaatgtttagtcagaaggttactgagacggataagttccttgatatggggcttactgctcaatcgctttatttccatttggggatgaatgctgacgatgatggttttgttggcaatcctaagtcaattaaacggatgattggtgctagtgaagatgacttgaaggcattagttgagaaggactatttaattgtctttgatgatggtgtagtcgttattaaggattggttagtttccaactacgtcaaaaaggaccgatacactccgacgatatataccgatgatatgaaattaattggtcttgataagaataagcggtaccaatttgtatccgatttggaaccagaacggaaccaagttggaaacgaaatgtctccagaatgtatccaagatggagacaaaatggaaccaaactgtatccaaagcggttccaaaaataaaaatcaaatttcaagtgaaaactctcaacctcaacagggacaaggcttcaactccatggaaccaaattggaaccagaatggaaccgaaatggatcctcaggttaggttaggtaaggatagagttaagttaagtaagagtaaagataatttaaatactactactagtactactcttaattcatattataaaaagctcgaatccccaaaatcacaaaacgaattaaaagcgttcgtgaatgaacttggtggtgacgtggtagcatttgccatcacttccatgtttgagaatgctgatcgtccaacatttgcatacttacgttcgatcttaaatcgttatcagcaacagggattaactaatcttgcggctgttcaacatgataatgatgtttataacggtaagtcagttgttgttactggtgctaagcctaagattcctgtttatcatctgggggaataagcatcgatggtacaagttggaaaaaagagagctattaagttctggaaatattacaaagaatggtatgagacttacaaatacggggatgtccgtgatgtcacttaccaaagatatattttgacaggtaaacaaattaagaaacttgctccagacttaatgctagataaaataacccgagctgatatacaaaagctcatcaatgcttatggacaaacgcacgaaaaagtaactgttcgtaatttctatcgtttactagaagcgccaatcagagatgcggtctatgaggggtggatttctcgtgacccatgctacaagatccgtattacctctcaagttaagaagaaaaagaaacttaagaaatggctagaaattgatgaagttcataaacttgaacaagtctttaatgctgatcaaagcggatatggtgacttctttgattttacgttacgtactggcttgcgatttgctgaggtccttgggcttaccccagctgatgttgacatgaataacatgtctatttacgtcaataagacactgaactacaagaaaatagattactctcaagttaaacctggggactttatgccgactaagaacaagtattctgttaggcaaatcctaattgattttaaggcattaactgacctacaacgccacctggatggagtaaaagaagatgagtcaatctgggctcattggtatgctagtgactctcgtactaatacccgaggtggtaatcacatttataattcagtgtttaataaagagttaaaggaaatgtgtgaccaggcaggaataccaccaatttcagttcatggtttgcgtcatactcatgcatccctactaattgctaaccgtgtttcaattcaaagtgttgctaaacggttaggccacggcaatacagaaacaacccaacgagtatatatccacctgctagacaagctagcaaacgaggataacaacaagattatgtctgtaatgacgggaatttgaggtggaataatgcagtttgatacaaaaaccgttaataagctattagaaattgacgagtcatataaggccccggaaagaatgctgcagctaatgcttgataatcagaaacgtccagaagtctttaagaagttcctagaagtttcaacggacctaaagtttgactggttccatgaatattttgaagacgaacaggctgaacggaaaagtaagaagcaggattttacccctgatagcattgcgaccttgcttaatagcctagttgatagtgataagtttaacggccactattttgagatagctgcggggactggtggaattttaatcaagcgctggtgggatgactgtacaaatgatcgagttggtaattcattacatgctgaccctaacttaaaattcttgtcaatcttcacttatgaccctagagcttattggtaccaggtagaagaaatgtcagatagagcaatccccttcttgctattcaatatggcaattagggggatgaatggagtagcaatccaatgtgattcgttaagcaggaaagcaaaggatgtttattttatttgcaatgatacaagtgactttttagcgtttagtggagttaccaaaatgccccacactacggagctaaaagagctttataacatttccgaatgggttgataagtttgactgatttcataacagacaaattaagtgatgcccttgatgaactagaaaattaccacacatttgacggaaaattttggaaatacagtcggctgagagcagaagaacttttgccggctgatgattggcggctacaagaaatacttaaatttagaaaaaaggtaggcgaggagtaatggaattaaagaactacttacgacacgaatatgttgctaaacggcggcagggagatcaaaagatgttagaagatcagctattcgatatcatgcaggttaatctagctcatcagctacacgataagggtcattacaatcggctttatctccccattgatatggaagctctgggctgtgatgacttcgtgatggagcctgaactttatcatttgtttaatcttggcattgacgggcaaaaaattgcagagaagttaattcatttgatgagacgcaatggctggaaacttaattattactgtgaagatggtcaaatgtttattgaagtggaggagaagagttatgagtaagaagaaagcaattaattttgatttatcggaaattgcagatggcggtgtgcaagttaagcttaaccgtgcattacaacaagtagcagataatatccttgatccaaacacggacccaactaaaaagcggaaggtacaacttaatatcacgttagcccctaatgaaaaacgggatgcctcagatgtcacggttgaagttaagaccacccttgctccagaggttggtgtaccaactaccatgcttctaggtcgtgacactaacggtaaagttcacgttaacgagttgaagtcaggcattaagggtcaaacttacatcgatccagatgatggtaaggctaagatggacactggcgaaccagtagaagaagtggaaaaagaagaaaagcggaaggttattgatttacaaaagaaggagaactaactgatgcaagagccaaatattaataaaacagtttttgagggagaatacaaaggtcgacgagtaattatacgtgaaatgcgtcaatttgctggaatacctacttcattctcaccacttcaagattactattgtgggtacgttgaattattgccaagtgactactattacaaccatttatcagaaacagaatcatgcttatctgtatatggaggcataacatggactcctgaatatggtaaattagctaatctgccaaacggttgtttcattggctttgataccgctcatgccggacagcctccctttagtcagcagaccgtcatggatgactgtatggaattaattaaacaaatcataaaacgaaacgaggaggagaactaactcatggaaacaaagattaacggtgaattaacccaatttgaacaactcgtaaatgatgctaatggcaacaatctttttactgccttaaatggacggcaatatcttcttgatcacgatggggatgcagcattgcttaatgatccgattattgcccatcccctccaattgaatcagttaactagcttgattgaatggctggaaagtgagactcaagcaatttatgacagtatcaaaattcatgttgttagtccgactaaagtagaagtagtcggcgagttaaatggtcatggtcaacgtccttgttttgctgaggttcgggcagtcgttgatagtcttaacttagaaagttacttagatcaggaaagcatgattattatgctgcagtcacattttgaggagaatgacgaccggaatatcattctgaaagttgttagcaatcttcgtgatgaaagcattcaccaacaaaccgatgatggtgtaagccaaagtgttcagattaattctggtgttgctagtgttgatgaagtgaaggttcctaatccagtaaagctaattcctttccggacattccaggaagttgatcagccagcaagcaaatttatcttccgaatgcgtgaggggatgcaatcagcattattcatggctgataacaaccagtggcaagtagaagcaaagaataatattaagaagcacattcagcaactagagcaagaaacatttggcgagattaagtatccggtgattgcttaatgcggacacaaataatttttcataacggtcttaaattatcagtacgagaaactaccagggagatcattaatcaatcactttacggtgacgagattattgttactcggtttaatcttggccacttagagcgtttcagaattaattacgatgatatggctaaactcgttgctattggttaatgaggaagcaagccatgaagattaaccgacgaaatttacataaaatccttgttgagtatcaaaaattaatgaagagcgatgagagaagaaaagtgtattagattaatcgcttaatgatgaaagacctagcaagaagatttgagctaccgttctataaaggaacaaagtatcgtggcaaaaaacactggttagccaattcttcactttattgggaattgagaaaaattgaagaaaaagcagaagaggggatgaaataaatgacggaactattaattatcggcgccgtcttgatttttactgttggttttgtcttaggaactgtcctatcgataaaacaagcaaacttcgaggaacggcgaactaatcaggtgagaaaatacaatgacaagtaaacgaaaagtacttcagcaattatcaaaggagcgaaaggatctgttaggtaagatagatcggctagctcaatttattgttaaagagggaccaaagctttcatccccattagaattaacaatgctaaatgcacagctaaggtcaatgcaagcttatttagaaagcttggatgcaagaattatttatctgagggatgagcaataatgaatcttcaatcttttgcattaatcttttcggtagtgtcattgattattgttctagtattatctagatactaaataaaaaagcgcaccacagtaatggcacgctccttcaaattatcaaacataaatattatatcaaaatggggagagtgctaaaagtggggcttttaaaagaattagatgttgacggaactactgataatgttcgctatttctttaaggacgaatatgcacgcttatgtcgcttagcaggtggaggaattaagctaacgtccccacaaattgacggaatgccaagagcaagtgctgctagtaattcaatggaaaatcaaatggttaaagttgctaattaccatctcttggttgagacaatcgctcaagcactcaacgcatgtagtcttagaagtaggcgaatattaattgctaagtttattcagaataaaaaagattgggaagtagctaatcaaattggttatgaaaaaacgcgctactatcattacttaaaaattgcttgtagtgagtttgcggatacgctggaaagatatactagtttgctcggggatgctgacttactagaagatcttcatgcatataaggacgaaaaaagtgaacaacgagtgaacaaacagtgaactattagtgaacttcaagcccgtttttaagtgcgaaaatgatattgtcggaaggttagcgatgtagccttgtgacccccaattgtgcctgagcaagcctttaactactcaaatttaggattctggctttaaggaaagagatttctatgcttaataccacacgggatctcttgttaagcttgagtgtggatcagatgtttgactgactgatgggtctgagccccataatccacgttgagactatcattaactaacttcaaaataaatttacggtaacgattaaatttggtttgtgcgttttggaagatctcctttagatcattaaatttacatactactctgatagtctcgtagcaaccgtgctgtaatcggcagaagagtacgtaatctaactcaacggctaaaggattaccgtatgaatggacagcaataccgttacaggagtaggcggaaaactacgaccgggtgcggtgattgcgtggtcctgattatgcgaatatgcaaactagatgccaagtatcctggagtggtccaatatttgtggggcagttcccgatattcgcaattgcagtgctttacgagtcgcactgcttgctgagatccaagatgggcacacaatcggtcttgtgtggcaaaagtgtggtttgaatccacctctcggctttatcacggcaaatttaactatgataggagatgaacgctcctctttcgtaattgcatagtcttttttgtctaagccgtgatttaatgcagagatgcaatgagtaacaaaattcaaaaacgattagtggatgcaagcatttctgtattatgctgacgtagcttaatggtaaagcaccacagttgtttccgtttcaacgtggagaaggcggttcgattccgtccatcagcattcaaggctcatctacttttaacaacaatcaacgaaaggaggaagcacctacttactagatgttttcttccattagccttgattgtccgcaacgacgttaaactactacattttatttttacctcaggctagtctttacggctggccttttgtattatagtgttgaggtgaaaataaggtgacatattattcaagtacatttaatactttgcataagcctaaggattcagaaaaattctttgacattgaaagcaaaggactttatgagttcttagatttcttgtttttagcattggatcctgatatacgggagtttaattattcacttatgactcctaaaaatgttcttgtgtcctttagtaaagttgattttcgggtgttcttaggggatgaaaaagcaatagctgagcttaacactattgcataccaaatacatgaacaaacacaattgccttcgttagaggacgctaacaatataggaatacaacagctgggctttaaatttgactgctactttgatgtgaatattagtcaatttaataacagtcttacatttgtaaaagaaaattttgataaaagcagaactgaaaagctaaaagcttttagtggtttgtttgatttaatgcaagccattttaaaaaatgaaagtattaatgtatcaggatcaagcttttcgtttcttcattgttttatgagagcgcgtcaacaaattagggatgaatttgaaaggaaaagatcaataatgaattttaacccaagatttcaggctagagatatcgttgtaaaacctaatcaaggattttatgttttgccctttgaggacgggcctgaaaatgcaatgcaagcgattaaagatgagattagtaacaacaagcttgaatgtgaattgataaagtctgaagatcgatttgatccaactcgtggtaataatattatcgaaaatatttggcaagatatttgcgcttcaagttttattattgctgatattagcaatcgaaatcctaatgttttctatgagcttggaatatgtgacactatcggtaaaagcgtgattacattatgtagtaagaagagtttagaaactgattacaaaaatcatttaccatttgacatttcaacgcaatatacgatcatctatgaagaaaattacaacggatacaaaaagatgacagaggaagttatcaatagaattaaaaaaattttgcgcatagataatggtgttaataaatgatttataagctagcaggctaatgtttgctggcttttttgtttggaggattaaaatgtttcagactaaacggtttggcttggtagcatctaggcaggaatatcaaatgctgtgtagagccgaacgacacatgaataaaatacaaaataaaaagccgacaggtcaacgcttgtcggctaaatttatactcaaaaagatttgatttgctattgtttcttatatgttaataaggtataataatagatgtagatgaggtaaggagtcgcgaccttatcaatattctacagcgatccggcgacagcctttctatccggatggaggcgagttcaatggatgaaagagtttatctggaaacctgaggatgcagttatcgttaatgctctcgtagcaatatcagttgcaagtatcaactttgcaattgcatatgcgataataaaaaaagctaatcgcaaatagcggttagccagcaaactcgtttttctggatcgcaaagggacgagaggtagcagctcttgtccttttgcatatatagtataccatattaatgttagaaggtcgatgttatggttagtgaagcacaacaaagagccaagaagaagtgggacgataagaacaaggataagaatcggatatatcgttaccgttcatatgctcgtaagtttatccgtgatttagctactgatgacgacttgaaagaattagacgaactaatacataaaagattaaatgattaaggcgatagcaaatggctaccgtcttttattttgccctcatacatattagaaaggggatgagtatattgaaaccaaccaagctaacctttatcaatgggaagccaacactggtatcctatgacaagatagttcgcaaggataacgacaaagcatataatttccatcgtaatgttgaagagaatgattacgttaagttctatcactcaacagaatggaagcataagcgacaagagatacttgaacgtgattatggattgtgtcagcgttgtggaatggatgcagaactggttgaccatatcatccccagcaaggacgattggagtgatcgacttaataatgacaatctacaatcactctgtcggggatgtcataagattaaaacgaaacgtgaatggatgaaacatcataaaggattggaacgttatatgaatatcaatattgtttgtggtttgcctgcaagtggcaagacaacatatgtaaatcgacacatgactgagcatgatcttatttatgattatgatgagctaatgcatgcgttatctggtttaccaatgcaacaaagcaatcacgacatccacgattacattacactattctttgatcagatgttacgaaagctaaaggcagaacagacattcaataatgtttggatcattaagacgttaccagataagcggattgatacattgcttagtaactatcatcgaatcaatcatattgttatcatgactgatccaaacgtctgtgaggaacgattatgtgaacggaaagaacaaatttcatttcagaagattttgaatggcttcaaaacggctgattttaccggctaccgggtcgtcaagaatggataagccccccttcattttgaacgggggttagatttttcaaaacgctggaacgcacatcgacttttttgcacgataaattccaacaatttttcatttttaggcccgatactaaaaaatccccaagctgttaaaagcttgaggatatgcgtttcttgatgcttttatcatagcacggaggtgagctttttggcaagaaagcaaaaattattatcgcagtcaacaggccaccttagagtggttgaacaagaagcaaaatataaggcagaatttatggctgccgatggtttacctgagttgcaaaagactccgccggcacatttagataaggtggccaaagcggaatatcggcgaattattggttctatcggaaagctgccattgcgtaacttggaccggagcgaattggaattgtattgtacctggtacagcatttataaagatgcttccgttcaattaaataaggaacagtccaagaaaagaaagaacattgctaaaatcaataacgcaattaagacaattgataaagcaaccagggcaataaagggtcttgcatctgatcttgggcttaatgttaattcgcggctgcagatgaacatgccacaaactgacaaggaagagcatcaatccttgcgtgataagtttaggatttcatgatgaattacgctaaagattatgctgaaaaggtcgtggccggcaaaatagttgctggtaaaaaggtgattttagctgcaaaaaggtacttaaatgatcttaaaaaggcggataacgatgactttgaatatttttatgataatgaacgtgctaataaggttattcaattcatggaaatacttccggatccaaaaacgatgcgggcgtatcctttagcagattttcagcgtttcattattgctaatatgtatggctggtggaaaaaagacaagccatctgaacggcgcttccgaaaaggaatgttatcaatggcacgaaaaaatggtaagtcgatccttatttccggaattgcattgtatgagttcttgatgggtaactcacctgaattctcccggcaaatattttgtaccgctaacgataaaaagcaagcgaacatcgtttttaatatgattaagaaacgcctcaatgctctacgttccagtgatggtgatacaaaacgtgggacaaaagttaatcgtgatttaattagtaaccttgatgattattcttatgttcggtctctttccaaggaaacgggaacggttgatggttttgaacctcatgttggaatcctagacgagtatgctgcaagtaagaccactgaaatgatggaattactagaatccggtcaggccttacttcataactcacttatcatgattatttcaacagccggctttgatttgaatgttccaatgcatacaattgaatatccctatgcaacgaaggttttgaaaggtgaaattactgatgatacttattttgcctacattgctgaacaagataatgtatcagaagttgatgataaaagtacctggattaaatccaatccaattctgagtgtcccggctttgcaagaccaggtatatggatatttggcaaagcggtggaaagaagctaaacagaaagggacaaagaattctgttctagttaagaactttaatatgtggcgacaagccgaagaggatagttatatggatattgatacttggaatgcagctcaaattgatccaattgacattgatggtcaacgagtttggtttgggattgacgttggtaaatcatctgacctttatgcaattagttggttaattcctcaagaggggtattggtatgcggattcttatgcgtttgtcggtactaaatatggtttggaagcaaagattaaagcagaccggttagattatgtccggttgcaagggatgggccagtgtgaaattacgaagcttgaatctggagttattgatgttgaacgggtatatgaatggctggatggctttgtcagagaacacaatcttgatgttcaggcaatttgttatgaccccgcacaatatggaaccttgttaactcagattgaaaaaggtcatccggaatggcaacagatatctgttcgtcaaggaacactaactctttcaatgccaaccaagcaatttagggatgatattttagataagcgagttcgacattctgacaatgaaattttaactggcgcaatggctaacgcgatccttaaatcagataacaatggtgtccggattgataagaaccgttattcaaataagattgatgctgccgatgcattgctagacgcatatgcaatttgtttccgtgaaaatattgatgattatttaacagatgaggatgtgtttaatgatgactttggtttctgaaaaagataaatttagccatgatattaagcaactagatgaatatggcaacgatagcaactggaccacctttatcactaaaaatgatgtggagcacctattaaaagggaagatcatcaatgactgttcagatggagaatatttccatccattggccttaactaaggaagcaattgaatttatcaaaggaatcgaggaggaatagacatggctaagtatctatacgacggtgaagaaggaatgaagattgatgtaactcccgcacttaatgaaatcaagggacgattggaacgactgagaaagcttgccccgtatattgagaaatttgagattacggatgaagacttgaaatttcttctccgggtgatgccatgaaattctggaaactaaacgaaccggttttgctgttcatattagcttgtatctgtttagcagttacaggctttttattttccacgaagattggcttactaattatttcaattgaattattcgtaatggcttttatctcttatgaaagggggtgaagctgagtgttatttcataccgagaaacgcgaatgggcacaagattatattgaccaggggattcttccggggtttagcaatatgccatcttatagtggaatcggtgctcttagaaactctgatgtgctgactgcagtctctcatgttgctagtaatgtagctcgatttccgattgtcattttggatgatggtaaaaatgcagtaaagaatatcaaaagtgttgattatttgctgaataagcacccaaacgatatgttatctgcttatcattggcgtttcctaatgacagttaacgcaattttaactggggatggtttttcaagaataattcgtgatcctcatacaaaagcaccgttagaaatacaatattttccaccatcgcaaacctatattgatgattctgatgtaacgaatattaaatacgaatttacacctatcaatcaaaaaggcggtggtcaaacaatcgttgtgccggctgaagatgtaattcattttatgttctttacctacgatggtattcatggccggtcgccgttgttgtctttggctgatgagattggattacaggatgatggaattaagactttacggcggttctttaagtcaggtcttaaaggtggattactaaaggctaaaggtaagttaagtccggaagcgcgtcttaaaactagaaaggcgtttgaatatgcacaagctaatagcaatgccggtagcccaatcgttactgatgatacattcgattactcgccaattgagattgataccaatgttttgcaactaattaacagcaacaactattcaactgctcaaattgccaaagcgttgcatattccagcatataaattagcagttaatagtcctaaccaatcgattaaacaattaaatgaagactttattacttctgatttaccttattacttcaagccgattgcaagtaatttggaaatgacaatgctgactgatcggcaacgtcataactgccacatcgaatttgatacacgcaaagaaacagggatgtcaatggacgatgtacaaaagggagttacaaataacgtcattactcctaatgaaggacgagttcggatggggttagtcaaatctgacaatccagacttagaccgtttccaatcaaccttgaatactgtcttccttgataaaaaagaagagtatcagaaacaatcaacagcgaagggaggtggaatcgatgacaagcgacttggaaactcgacagttaatgatgccaattcagatgagaacggcaactgatgaagatgatgaaccagtaattgaaggttatgcagccaaatacaataagccatccgaagttttgggtggctttactcgctttattgagcaaattgctccaggagcgttcgatgacgctgatatgtcaaatgtagtagcgacgatcaatcacgatcctaaccaggtactgggacgatcaggggtgaacatgactttatcttctgatgcaattggcttgaaattcactgttaagccaactgatacatcatttgcgcgtgatttgatcgccaatatcaaggcaggcgttattaatcaatgcagctttgcttttacggtggccaacacagatgaggcccaagattgggaagaatctgaccaggatggagttgattatgaacgaaccattcgacaaattgatcgtttgttcgatgtatcagtagttacaacacctgcttatccggatacagaagttcaggtcggtcagcgttcgatcaatatggttaagcaaatgcagagccaagaaaatagagatgctactgatcagaaacgtaaaaagatgttacgtgaattagaacgacaagaattattgaagacactcgaaggaggaaattaaatgtttcgcgaaaaaattaaagaattgcttgctcaaaaagaaggtaagcgagcattaattaacgaaaaaactaatgaaatgcgccaactgctctcaaatgaagacgcaactgatgaagacttaacacgagctaagtcattacgttctgaaattgaagctgctgaaaaggaagttcggagtattgaagatgaccttaagctttaccgtaaagcagctaagggtaatccagctccagatcctcataagcgttctcaaaataacgaggacgaaaatgaagaaaaacgtaatttcaacgcatatcttcaccaagaacatcgtgatggtactactggaattacttcttcagacgcaagcgttactattcctgaatcaatcatttacaatcctgaaaatgaaattaaaacagtaactgatcttagccaatttgttcaagtatttaacgccacaactgcttctggtagttatccaattcttaaaaaggcaactgctcaaatgcatactgttgaagaacttgcaaagaatcctgatcttcaaaaacctgaatttcttaaggtagcatggcaaattgagacctatcgtggagcaattcctatttcacaagaatcgattgatgattcagcaattgatttaactggattagttgctcgaaacgcaaaagaacaatccttaaatacaaagaatgcggctattgctacaatttttaagggattttcagctaagaccgttgatggctctaatgcaatcgatgacctaaagaaaatttggaatgtcgatttagatgtggcttacaataagatgattattgccagccaaagcttctacaactggcttgatacattgaaagataagaatggacgttacttacttcaagatagtatttctagtccgtctggtaaagcggtctctggaatcaacgttgctgtaattgaagatgacttatttggagcaaagggtgaagctcatgcctttgttggtgatccataccgtgcaattattttagcaaatcgaaaagatctccaggtacggtgggttgataatgacatttatggtcaatatctccaagcggttcttcgtttagatgtgaagaaggccgatgaaaacgctggttactttgttactggtccatcagcagcgtcaaaataacgccgtccgacaacggggcggacgttaaaccgactagtgctgatacggtagacacaatcaaaaagtacttagatgatcatggaattgcctatacttcaaccgatactaaggatcaactgttagcaaagctaggtgagtaggatggaaacagaccacactttctcgagtgatgaacaattctttgccaatctaaaaaactactgcaaaattgaccaggactttgatgatgaaattcttaaaataattgttgatgctgccgcattgatgattgcaagggcaattaaatgggagagtaagcctgctgactactctgacgaaccgcgattcaaaattgcacttatgaagcaggtgaaagaagacttctacgagcgaggaattactgcagatagttaccgaccagttctttcatcaggaattgatggccttattaatcaaataagtagtgaggtgaataccgatgaaactacggaacatgacggaacggataacattttactcagtccaaatggggatcaatccggaaactcatcgaccgatcaaggatcagaaagttaaggaatttaccgtgtgggcagaagttcctaagctgtcagtccgtgaatttgtccaaaacagttcaaacgtggggttcagaaaagaatcacccacgtttttaattgctttcaaaactcgtaaggaaattcaatcgaattggttaattaactggcgaggaaaatggtatgaaatcacgggaatggatcctgattatgcaaagcgagatctaacaaaaattaccgcccaggaggttgtccaaaatggcagtgaccggtgaagcagagctgattgctaacttaactaaacttgaaaagacggaagaaaagaaggcacgaaaagcaacccgtgatggtgctaaagtctttcaagaagaattaagaaaatggacgcctgtggcttctaaaggctctgatcattcaggcaagactcctttaaaagatcatactaaacacggtaatctcaagactaacggtggagattattctgtcgatgttggttatgacaaagataaaggatggattgctcacttccccgatgctggaactgctaagcaagatccacaacactttgttgaagattcaagaaatgctgctaagaagaaaatattggctaaatttattgaggacttgaaagtatgaaaactccagagatgcaagtagccgattatctaacgaatgatgagtgcctagtcgtgatgatggatgagttgcgacaagataaattatcatatgttccaatttttactagtacgcctgatgatccatttattaaagcgagttcagcaccgtggattcggatcacccccctacctggggatgatgcaatttacagtgacaatgctcgcttttttgaatacccacgtgtacaagttgatttttggattcgtgaagagaatgatgaccggctaatggatattcaagaacgaatatatgaaaccctccacagtcatggctttgaacgttactacaagaattcttatccggatccggacttggataattgcataatggtcacagctaactttgaagggtttgaagaaaggaatgatatttaatgggaacaccaaatgcaaaagttgctaagtttggggcctctaattttgaatatggggtgctagacgagaacgaaaagattaaagatacccgaaagatgagcgggttaagtgaagttaagctggagctgactaacgaattaaagacgttagcagccgatgacggcccttacttggttctttctggtggaattaccgaagctaaggaaaccatcaacctttatgatattgattccatcatgaagaaagacttgtatggaattgatattcagaacggtacagaagtttatactaagaatcttgtaccaaattatgttgctactatgttccggacaaagctttcaaacgggaagcattgttgggttggtttaaccaaggggatgttctccttaccaggtatttcaatcaagactcaggacggtgctccagacccagaagcagatgaaattgaaggtaatttcgttccgcgtggggatgcggatactggaaccatccttttaatcggtcgggaagataatgaaggatttgattttgctaagttccatgcaatggtctttggggaagaagctccagtaactgatccaaccaatacaaaagatactaaaccagaaactgttgttgataaagggtaactaattaatcagacagagacgagttaagtgagacgatgaggaggatatggaaatgccatataaattaaaagtaaaaacagatggcaaagaaacaatctatgaacgaaaagaagccccaatgcttgaaaatctattagatgcattaaaggttcaacgtcaagaaatagtgatgtactctgatcccaaaaaattgccaacagataaagataatgaacgattattaagtttacgggctgagtttgctgctaatttttggaagaatggattgactaaaaaggatgttctttcaggagttacggctatagaagggttaattagcattgttaatgcaattaatgaaactctcggttctcctctaagtgaagatgacttagaagagaaaaaggataacgaaaagccaaaaaaataactgttgagatgattgatgattcaatcaagagtctcacagatttcattaaaaataaaatgcgcgatggatataaatggaatgaggtcagtaagctaacactttcagatttgaaattaatgaattacgtctttgaagaaaagcagacaaccattgataaagcattcccattcttattctaggaaaggaggttaaataatgacccaatcattaggacatttggcagcaactgttagtttggatattgatccgtttaaagcggctaatggtgttttaaaagcgcaaattaaatcaacagccaatgctttgcgtgcgcaagaagcggcactgaaagcatccggtggaagtattaataatatgcgtgctgcttatgcgactatgagtcaacaaatgcgcaattataatgcgcaactccagaatgctaagaaagcaatggatgatactaccaggagcgagcagtcacgaactaaggcagcaacccaatataataaaacgtctgcgcaaattgaacaattacgtggacgaatgcaagctcttaatcgtgatattgaattgcagtcgaataagtggacacaacttgctaatcgcactcaacattttggaaatgtggccaccaatgttggttctaaaatatcaggtgtcggtcgagggatgtcgacttatttaacagctccaattgcggcagggttaacatattccgctaagaaactcgttgacttccaagatcaaatgacaaaggtcaagaacgttattcgaacttccggagaatcagctgcagaaacgaatgccgcatataaaacgatgactgcagatgcccgaaagtattctgacgagtacggtgttagtcagcaaaagattgctgccgggtatcaagatctagtaaagcgtggttatacatctaaagcagcaattggagtaatgcggaacgaacttaaagcatctgtggccactggggatgactttaatgatgtaatcaaagttgcttcgcagacaatggaatcttttggactggctactgataaagcaggacgtccaatcaagaatgctacagtcatgcagcgtagatctactaaaacattaaatgagttagcctatgctgccgatgccacatcaactgattttcaatcacttggtgtgggaatgtcatatgttggctcaactgctcatcaagcaggttttagtctctcagaaactgctagtgcaatggggatcttgtctaataatggtctagaagcagacaaagctggtaccggtctacgaaaggttatcaattcactaattacgccaaccgctaatggtcaaaaagctttagcaagtattaatttaagtactaaagattttcttactaagagtggaaagttaaaatcaatgtcgtctatttttaagacgttaaatgaccatatgaaaggcttatctggtcaccaaaagaatgatatttttcatgcgttatttggaacaactggacaacaagctggggcaattttaaccgaaaacgctaatcggttacgtgaacttaataaagaagttcaaaactctgccaagcgggattatatcggcgacttgtcacagaaaaaccttcaatctcctaaagcacaattagcaatcttcaaggaatctttaactaacgctggaatggatatggcaaagtacgtcttaccatctattattccaatggttcaaggcctttccagacttgcacatggctttggtgatttatcaccagctgtccagaaggcaattgtaacaactaccctgttcactgctggtgcaggcccgttgttcctagcattgggtaaactgactagtggtgctgggaagacagttcttgcctttggaaaaattgcttccggaatcggccgtgtacaaactgcaatgaaactaggagccagtgggttagacgttattggctcagctttttcaaaatcaacatttcaagctgcaaagtttggaacaaccatgactggtgcaggtggtcgggcggttcaagctgctaacggtgttggtgctgcgactgtcgctttacaaggtaccggtgtagctgcaggtgaagcaggtgctgctactgctgcggctggagtatctttaggaacagttgccgctgttgctggagttgctactttagccattgccggtggaattactgtttgggagctttggggtaagaaagctgtcgaatcatcacaacgaacgaatcgttggggatctgatgttggtgcagctgctgataaggctttatcaaaaatgcagtcgacttctcaaggaattcagaacactctgtcagatatggatgttgctgcctcaacttcaacaaagaaattagctgctgattttgaccgtgagtttactaatattgaaaatagtgcaaaacaacattttgctaatgccaaaaaggcagaaaaaggtctgtctccagaaatatctaaagctattgacgatgagttagaaaaggagaaaaaacaatataattcatatgtgaatgatgcagataatgccaatcagcgtgttcaaacaattctatctgaccacaataaaaaagtttcacaattaaatgatactcagcgagtcatgttaaagaacaaccagcaggaaatgcttaacgatgagatgaaaattcttaaattaagtggaagtaagcgtgctaaagcaatggctgtccttaataacgatattaagcatatgtctatgcaacaacgctcaacaaaaatgggagatataaccagtgaaactgctgaaatggaaaaccaatacaagaagcagtcttcaatgcttgctaaacgctacggaaaagattctgaactgtataaggtcggtatgcgtgctaataagaaagcattaacagattacacgaataaagcagctgccgaatatattcgcctggcccgtgctaatggtgaaagtactaaattaattaagaatgacctaaaaagtatgggacttagttataaagatggcactgatgagattaagcggcaatccaaagctgccgaaacaaacctacaaagcttagcggtaaatactactaaattaagtggaaaagctaaaaaagccgctgatatgtggaatgacttagttttcgatcccaaaactggtaaagttcggactaatgcccaggaggaagttaataaggctgttaattctaaagatcaatggaaccaaattaaacttctgaaaaaggaaggtaagttaagtaccaatgctcaacaaatggtggcagctgcattaatcgaaaatggtaaatgggatagcatgagttggaaagagcagaaagcttggttgaaagacggctttagtgaaacaattgttcaagctttagagaagtcgggagaatggaataatcttgatcttaagaccaaagaagcaattgttaaggctaaaggtaagcaagaaatggccgacattctgcttgaatccggtgcatggaattccttgtcattaaaacaacaggaagcagtaattactaataaggcaactaagccaatttatgaagccttgcaaagttccggacagtggaataatttaaccttaaaacaacaggaagcgattattgacgctaaaggaactccacaattagttgatgcattagtgcaggctggtgtttggaatagtctttcgtttaagcaacaacgtgctttggttactactcagggtgctggtcgattaatggatgcgctcaataaaattggtcgctggaatcaacttagtcctaagcaacagcaagcaatcgtaaatgctaagggtggacccgaactacagcaactgatcactgattatgggctgtggaaggggatgccggttagtgctgcaaaacaaatcattgctgatgataaagctagtggaaatctaaaagctgctaacgatgcccttcaatcttggcgtcatgctaatccgggagaaccaaagaatgcactggcaattgacaatgctagtggtccgatgagaaatgctactggtggtgtcgatgtttttgctagttcaaatcctggcgctcctaaaaatgctttagccgttgataatgctagtggaccaatgtatagtgctcgcaatggtgtaaatgcttttgctggatcaaatacgggaccagcaaaaattgcaaaagctaatgataaagcttctgggccaattaaaacagcacttgatgcaatccataattttatgagtatacctaatactattgagaaaacagttaatgttatttttcataaatcaaagcatgctcagggaactaattaccataaaggtggattgatggaagttaatgatcaacctggccccgtctttcgtgagttagttcaattcccaggtgaaacaccatttattccttatgggcgtaatgtagtctttccagcaccacgaggaacaaaagttgttaaagctagcgatactgctaagatgtttaagcacttaccacaatatgctaatggtactgatgatgctgtttcggtattaactaactttaagcccaatatgcaaagcacccaagttgtaaataattataataacggtggccaaagtaataatggaatgcaaaaagagatgttagatcggatggaccagatgctcaaccgctttgggacaatgctgggcttaaatgcagctcaactttctgcaattaaagccggcgcctttgacaagaaccagttttatgggattgaaggaactgatcaagcattatttgataatcaacatctttaggaggtggtcgtaatcgctgtaaacattctttacattaaaattgatgatcaaaaagaagtggccagcacagatattactgaccacttaacttttcttggcttaactgaatcgcctagtgttattaataattatcgtgatgattcccaacaagatggtcaaatttggagttattcccgttatggccaaacgacgatcaccgctaagttcttattgcagttctttgatcgaaaagattttaagatggcaaagcatgagatttatcgcgtttttgcacaaaaaggaatctttaggttaagaacaggagttgagccggatattgtccgttactgtcgggctagttcctttgagattaaaagcgaaccagaagaagttaactattgtacgtttgaagtgccttttgaaaatccaagcggaatgcgatttagtaaattgcatacggatgagatgaaagatgaggatttcttagacttgaatatgaacatggatgaggaaactccttcataccatttcaaaggccagaataagttttctatccttaacgatagtgatattacaatcgatcctgttgaacagcgtcatgatctaaaaattactattaagcataatggtggaaaattcacagtaaagaatacaactactaatacttcttggacgtacaatcaaaatctatctggaaacgatactctcttgctaaagggacggcgaacatttaagaataataacccagacagtgccaataccgattatgggtatattactttagcgcctggaaagaatgactttgaagttactggtgcagatgatttggaaattacattcagtttcccatttatgtatcttggttaggaggtgaggacaattagtttagtattgatgacacctcataaagagacaactaaggagccaatcggagacattattctctggccaacaatgcaaagcgagtggtctaagaattcgacctttcaattgactttttcagtatttgattacgattcagcattgtatgatccattagatgttgaaagttcgattgtgcttgagggacaggaatatattgtaaaaaattgtgttgaaaactttgatactaatacgaaaaatatcactgcttggcatgtctataatgagattagtcgaatttataaacgaagtgaccttaccttaaataacaatcaggatagtaatgctagtaaggatcagtcttatggagttgaggacttactaaaggcttggattgatggaaataagctaggctttagctatgaagttcatggtaattttgataagcagtcaacttctaagttcgatagcggcagtggtaaagagatgcttagtaagattactgagttatggccaagtgcagttatatatccggataacaagaagatacgagtttattcagaagatgagttctataaggataatggtcgagtgattgattttccaagggatgcaaagtcagttaaaactactcgggacagtcaatcaattattaatatgattcgttgtgttggtggtaagcatgaggttcagcacactgtttataccgggacaggtggaactaatgctaatggaccaactgagccagtcaacggtgattggacaccagttattcagtatgctgctagcttttatggaataaaaccgaatgctcagcagcttaatgttttacgggcacaaattcatttggaatcaggtggaaacgagacgattccgcaaccaggaactgatcccgatggcgatggttctggtccggcgcttgggttacttcaatttaagcgaggaacttttaatacttattgtcgggagccctatacaaatatcttaaagggttttgaccagttaattgcgttcttcaatattcctaatgcactaggacaaattaatggtgttactggttggagtcctcatggtgccccaatcacgaaagataaattgatcatttcaccacctaatccgtggggatggcctttcccagatgttggagaaggtcatttttcattggggcaaacttttggaacacaccctcaagatggagtggggcgaactaatggttttcacgatggccttgattttggttctgtcgatcatcctggacgcgatgttcatgcgattcatggtgggaaagtccaggatattggatacattgctggactggaaaactatataactattgtgtcgaatgattatttaatttgctaccaagaagcatttttgaatcgaggagatattactgttcaagttggccaagaaattaagacgggggatgttattggccaccgtgatactagccatcttcatattggaattactaagcaaaagaatttaatgactgcattgaaaagtgcctggtcaaatgatggaacctggcttgatcccttacaagttattcgtgatggtatcggtggtaaagaaaccaatgatactgtcggaaatgatacaaccacagaatcacaggaagagtattattttcaaccgtttatggtagttgatcaaaagtcaattgacgaatggggagaacatcctggacctgatcttgttgatgaaagatttcaagatgcggatgcaatgcgtaaatatgccttaactactcttaaacctgatccagatttaaatattgaagtcacgcttcagggaaattcatttgtacctgttgctggtgaaattttaagagtacttgcgcgagataaatattcaggtagttataagactgtcggttatacgatatatccggaagctaagggacaagataatcaaataacgttaaataattcaaaaacaactattttagattatcaaaatcagaaagctaaacgtctacaagaagctcttgaagaacaacgactccggattagtggattagcaaatagcatggatcagcaatccaagtcattaacgcaagtcgtgaatgataagaaagagacggataagaatatggaagcagtagaccagaatatttactggatgcaaaatggccagcataatttggtaactatgatgactggcggaactgtttccagcgaaaaatataatgacagtccagtaattgaagtagagcaaggcactctcagaagcaatgaatttaacctcaacggtgtctcctccatctcaagtcgtctcatggctaagttaaatgcgaccgataattcaagttccgctactacttatgtcgagttcttgaagagcgatggtagttctgccggcaaatcgaatattgtctatatcgtcaataatggcgcctggcaatccgccggcacagttaacattaaaattccagccggcactactaaaggaaggctggtttttaatgtttccggatctgataaagcatacgtatcacgggcccaggtaaatctaggttacagagtgacggattggagtagtttgaagtgaggagggggatggtcatttggatttagaaactaatctagatttgcagagtggaagaaaattccgccagcaattaataaataatttaacgataattcaaaatgaggataacaaagacgataatctccgtgacaggcagtataaagaattgattaggctactcgaggagattaatactcgtctcgaccaactcgaacaagaaaaagccacgcgagatgaactaaaagaggctcaagaagcgtggaaaaagaaaattgagcatgtggctttagggaccgactatgaaacggttgaacaagctgtcatgcagattttgaaagagaaaggaatgatttaatgtcacaaactttaacttatgtgatcggtcaagaccggcgtccgcatgttgacaatgtacaagacttcaaggttaactttgatggcagtaatactaactgggtccaagcgcgtcagtatgagcgaagtatgcgtcaagtttttgtcaatattaagaacgaagacgggacaccactagatttaactggctgtaacgtctggtttgaaggattacttcctaagaattccgccggcgacttccgagtaattgatgataaaggctacgttgcccttgacccaaccgccggacgtttccgtttcgacatgcccggccatgcctttacagtcgctggttcctatcgccaagccttttttcgcatcctcaaagacggtaactctatcactaccttggaattcgacctcgatgtccttgctgataaggtcattgatggcttggtaccacgaacatatatttcacccgtcgaagagttaattaacgaaatcgaagccaagtaccaagacagtaccgacaagctcaccaagatgaccagtgactttattgataagtttacccaatcaatgaacacgctcaaagctcttggcgttactgttcaaaatggtttagatgcactagacgctaagattaagcaagacaatttgtttacccaggcggaagcagaggcgtttaagcaggaaatgatgaaggcaattgcgattaactatgcacatgtgtatccaaatgtagctgccatgaaagctgatagtgctttaagcaaagatatgtgcgcaagaactcttggctattatgaaccaaatgatggaggaggagggcttttttatgtcacagatacaacaactaaacatgcagaacaattagcatcaggactattagcggaacttattgaaaatgaaattatacctgaaacatggggagcacatggagatggtaaaaatgatgattaccaaatccttcaaagcattctaacctatgcagttgataataataaaagtgttcatgggaatggatgttatctaattgaaagtccattagctattgacttgaagcagtctcatatttcgttgaggttaaagttaacaccagcactaaacgtggatcaaattgcattcaaatttagaaatggaaatcaaaatgatattcaaattatgctagagcgaggtgcagctaagtatggggtttcttttgataccatgtttcatagtaatatttcgattaaagggtattatttcagaggatgtatattaaacgtaactggtacagatgcagataacacacataatattgggatcaaaatcaaactttggaactataattgctatcaaacattgtatcagcattcggtatcgcaacaatccggtttcggtgaatattcttttgtgtgggaggaaacgtttgatatagcagacaatgctattggatcagtgattgattcaacttacgatctaactatcaaacattgggaaagccattttgttacaaataaaagtggacaagctaatctaaaaattatgctatcaaagggccacattgattaccttgcacttgggggaaaatgcgatcagttgctcactctgcaaactaacgctgagtttacagcaaacgagattatgctaggagctgaaagagaaagcatgaatgggctatatattgggcctagtacgactggaacatatctagatgtggatcactttaagttaggtggaaaggcttttaatactggagttaaattttacgatcaaaactcagcccattttcaagctgggagaatttatgctgataaaacgccaacttcgctcattagtttaggcaatacatcgctaggaatgagtttgcaagatcatcaaacagattacaattctaatttaaagacgattactaaatttatagctattgatcaacttaattcgcaagaggtcaagacacttccaatggatgctatcaataaagaacttggagttactgggaaaatacttaactatgttgcagaaggcgaccgctggcaattgagtgtttcagaagctggaaacggcgatggattaatcgttagaaacattgataactcagctatacaaaatacaggggtaactgtaacagtgttttatcaaacaaaaatatactaaggagagctttattatgaatgatagtcaaattcctgtgacgattatttcgcattcaaacgggaataccaatcaacaaatcactattttgcaagcaatgattatgcaacagaaccaatcaaatgcaaaattgcaggctactaatgctcaacaagcaactcaaatcaagcaattacaacaaatgtttatgactgttaatcagcaacaggcagtcgaaaaatctaaggaggtaacggcataatgatgacacaattacaaatgcttcaaatgttttggaatgactggggtaaccatgatttagaattctacaaagtttatgtacgatgcggagcgatcactaaagatgaatataagacggtaaccggtcagaattacgaaattcaaggagcataaatcatgacaataaaattatttaagttattgtttagtagtctaaattagtgatactctataaaatagaggtggttatcttgaatatttcaaaatcattagaagatattgttaatactgcttacgaatatgataatgaattgtgtaacaatcccaaattaggtgggtatccattagcagcatttggtttaaaaacaaatcggattaattcacaggaacagtgcattaaatgggaagcctattttgaccgaaaacaagatggttatactcctaaagaagcaaaaattattgaaaaaaataaattatataggaaactgaaccataaactttatataggttattatcgaaatgtattctatgtttctgaattgtcccaagaagatgataaatttactcctgctaataattttcccaatgaagtaaaagcgtatcagggattaattactaagattcgcttgtatcagattgaagataaagaaaagctaaagaaaatggctaataattaaatgaattcttagcttaacggtaattacttatagtcgccttagaaatacacaatacataaataagcctcactcaaacgagcggggcttttattatgggcggcattttattaaaattttgattccatacttttgtaaattaattattagcctttggtttttcttcaatttttcataataatatcataattatttcaattactgatacgataatattactaaacaattaataaggggaatggtaaatattatgcaacattatactatgaatagtaaagacgaggagtatgcaattagtgaaacttatctgttatgtaattttactattattgctattaaaaatatatataataccaaacatgaaaaatattataaagataatatgatttggtataatttacaaaatattgcattgtatacgtcagatatagctaagcttctatggggttctaactctaaaaatagtaatgatcgaaaaaaggtaagggaaattttgaatgtaactgatgatttctatattaatagggtcgaaaatgaaaatttaagaggcctcaggaatagtttagaacatattgatgaaggacttattaaatttaaccgacgtcagcacataatggttgaaaaacaagtaattggtaatttgtatcaaactataaaagttggagacaaagtgttcactcctacaaaagatgaaactttaagagtatacgatcctcataagcatgaattttttatatttggttattcatttaatttagataaaattttagatgatgttgtaaaaattaataataatgcagttcaatggttatctgataataatattccatatttagtaacagcgtaatataacacttttattttagcggtaaggagatggggataaagtgaatctcaaacagaaatattctaacgaaatagataatattaaatctttgactgaagaacttcgtcaaggaaaaatatatgaaattactagagtacgaggtgattcaagtgcgtataagctagctaatgatattgataataaacttaacgacttaataattaaaatcaataataatgaagatggaaattgggaatcttttaataaaaattaaataattttaaacgtcctctacagggcgtttttattttacccttataaggaggtgaccactataaatgcacttactactgacacaaccgccacaacacgttctatacattcaatattttgccagcatgattgacaacgtgctcattgaatggttagtttgggcgattgtgattgatattgtgacaggttttttcaaaagtatcattacgcaccgaacaacttctagtaaaggaacgggtggacttttgaaacatgctgcagttattattttgactttaaccgtttatccaatgttagaattatgcggattaggacaggcaggcgactcgcttgtctttttctttttcctattttacctagtttcgattatcgaaaactggggccaaatgggactaccattaccatcttgggtaaagaatcatatttacaagctcagcaaagattatgtagagaaagaagagaaacaacatgagcacaatcattaatgcaattccaacctatatcatgacggccgttatctcaacggtcttttattttgccttaaagcaaagccagacatttattcacgctaaagtcactcatgccaaaacagaaacttctcgtgctgcttggtcttgtgctgaacgacttgcagataatgccgttgcttccttagttggcaaagacatggctggtcatgagaaatttcatcaagcaacaggtattgttcaacaagcacttcaaaagcagggtattaagaatattgaccttaacgctattgaaacgcttgtgcaatcagcttatgaaaagtctgcattgacaccaaccgttgatccgacatcacaaccaactaaacccgctactattccagccggccaagcaccagcaatcgatccaatgaaaggggaagaataatatgcgtaatcaattcatcgatgtttcaagttatcaaccagatactgttgcctttttccaagctgctaaagctcagggtgcattaggggtcgttgttaagttaacggaagggtccgaagatggttcggcttatgttaatccacgtgcggccgctcaaattcgtaatgccttagcggttggcttgcgcgtttcctgttaccactttgctcgttatacatcagtgactgatgcacaaaatgaagctcgattcttcgttaaaatcgctaagcaatttggtatgtatgacgatactttgatgattgatgatgcggaagttcattcaactgcagattatcaatcagtatccttagcctttcttcaagaagtagaagctcttggttacaagaatactgggatttactccatgaagtccttcttcactggcggtattcttaattcacatggctttgattcccggaagatttggattgctggctatggtgtgactgaactggggattgataatgcaagtgcttggcaatattctgatcatagcatcatgggaattgatactagttatgactttgacggtgcctttacgactggtttagtatcaggcaatgttccgcaagctgttattccagcaccacagccggttcaacatattggtcacccagctactggaacctacattgttcagccgggcgatacattgagtggaattgcagaaaaatacgggactacttatcagaacctagcagcaatcaatggtattggtaatccaaaccagatcaatgtcggccaagtcctcaaagtcaccggaaaagtatcaaacgaaaatacttactttgttcaatcaggcgatacgttatccggaattgccaccaaattcggcaccactgtctcagacctcgtaagccgtaatcacattactaacccgaatgtgatctacgttgggcaaaaactctacttagccggcaacggacaatccaatgcttatactgtccaagcaggggacacactaagcggaattgcggctaagtttggcaagacctggcaagcattagctcaaaagaatggcatcgcaaatcctaatatgattttcattggtcaaacaattcagatttaagtgaaaaattatagtaataaacaccctagtagccgattaatggttgctagggtgttttgtcatatagtaatctaaattagatatatcataaaaaggagaaaaccatggtgtctgaaaagaaaaaatacaagatatttgatttatcgactcatgaaatggctgaaagatcattagaactatataaaaaagatgaaattgaaaatgcatatttttaccactttacaacttgttcttcacagcaaaggaactatttatatgatggattaaaaccacttagcaaagttataacagattctagtaccttgttaggatcatttttagaaaaaaataatattcgtttctactgtaaaaataataatccttttatttcatataatgggcactcatacctgattgaatctggtggaagttggaatgatattgcagcacgtttggaaaatgataacggaattagtggcttttttataccatatcattttgattattcttgcatttataagtgtcctgaaattttaaggtaccttgatagtgccatatatgaattagataatattagaagtaggccattaaaagggcctcttcaaacaagatgggaacaagagcatttcaaaacttacatattaaaatgtttagtaccgatggacaaaatagaagaaaaaaggcctaatttttttaaggatgctgcagaactcgcagctaataaagatttcaatgatattgatgatatgtcagaattcgtctacgttgaagataaagattgtaatatgatagaggttaaggatgtaaaggaattcaaaatttaatagagtaacattaaactgaatagttactaaggtaaaaaaataccatgactatattcttaaagtataataaaaaacagcgatagcaaacactaccgctgaaatagcatctcgcacatttcctatcagaattaaccaagtaattcatcaattagatgtttgagagcctttttgattacaacctttgcataatgcatcagttgcttgacgagcccgttcggcacgatcagaatgagaagtataaatgtcacggggaattcaccccttttgcgtgatagtttgggtcgttactcccgacacgcattaattattgtatcataaaataattatgttataatttaaatatcagatgagaagtatcggcacgcaaattggattcagttcgttacttgatccgtaccggtataacgtggggcgccctgataggcgctcttttttattttagttaagttcgcacacgtttggcacactaactccttcaaaacgttgatatatcaacaatcttctatgctcgggggacgcatttttttaagattgtataaaaaagaagctccgataaaatgctgatataacggcattttaccggagcttttgtttagttaaaatggtatgaaatggtgaaagtttgtaaagctggggaacatcggcaatttttgtgcaccaaaaataatcattgccgtaaacttatttgatttaattgagtgtgcgggtgctttcaatagaaaaatttttgattatggaatatattttaatagtagtaaagctatagcaatcttgctataattagtaataaataagctataataaaggaaatagtgcatgtatgaagtagttttttacgaagataaaaatggaaatagtgaaattggtgattatttcgagaaaatttcgcaaagtaaacaaaagcaagataaagcaatttatttaaaaatgcgccatcaaattaagatgttacaagctcttggtcctgtgttgcatacaccacaagcaaaaaaattaaagggttataggcatcaactatgggagttacgacctatgccagaaagagtattttatggagtatggaagaaaaataattttgtattattaaatcattatgctaagaaaaaggatgaaacagatcctcgtcagatagaaagagccttgtcgctacttgacgattggtacgaaaggaagggtaaataatgagaaaatgggaagatatagataagcatcagacggctgcaacaaaagaagaattatcgattgttgataccttgtcttttttagaagtacaaagaattaaacagggcatttcgcaaacagaatttgcaaaaaaaatcggtatgacacaacctcaattggctaaaatcgagaatttagattcaatccctacgctgcctacattaaataaatatgctgctggattaggtttgcaaatcaagttgtctatttctccattgatggaagccaagtagataaatattaacaatagttgcaccgtgaaaaagtaatttcatggtgctttttgattttgtcaataatgtgaaagttggattgttattagtttgctttttagtagtaaaggcaagaaatgatctatggccgggttaaatacttatctaaaaagtccatcacaattttaaatacctgtggttgaaggaattttacatccatgtgacttgcaccttcaatttcgtataattcagtaggaacgttgttttcaactaatacatcataaagcttttcactatctttgattggaacaacgacatcctccgtaccatgaaagataagaaagggcgtagaagtagaatttacatacgtgaggggatttgcagcttcaggttcagcgccaagcaagttacggtaaacaaaatcaaaatcgtttgatgcacttcctgttttagcggttaagggatcaactacaccataaaaaggaaccgctacttgaacatcactggagtaatctaaattagcacctttgtcgaattggttaagaccattagtaacacctaacatacttgccatatgaccaccagctgattctcccatcgcaataaaccgattaggatcagcttgaaagcgcttggcattagctcttatataacgaatagcagccttagcatcttccaattgcccaggaaactgaactttattgctatcacgatattcgacaccaacaacaatataaccatgccgagcaaaatcaaccaaatttggcagatgaacattgtgatcagtatccatccagccgccaccagcaaaccaaaaaattactgggtaacgtgtatcatcattagtttgaaaatgccgaatgactgaaagcttcaaatctcgcgttgtattaccaagccatccaggaacttgcgtatacgtaatatctgaatctagccataaaccgtcacgtacttgatcaactttaagcgtatgtttcatgataaaaactccttttaaaatacttttgacatagacttcatcaatagtattacataaatcttttaaaacataaatcaaaagtattagttttgtttagaaaaagttttattaaagttaaaaataagcattaaataaattcttttgagaaagctaaaaattgatattctggggggaattttaaattcagtcgcattaaaactataattttaatgacatgttaattttaaaataaatcgttccctctttacgtatttactagcaacttcgcttattttatgattagattaaattaatatatatttataaggagcgatcatctatggaaattcaatactgggctgatattgcgtgcccatattgctatatgggaattacacaattacaacgggcgcttaaagaattaaagattgccgatcagacaccattaaaatttatgtcatttcaactagatccaacgttgccaacaacaactgatttatcaatgacagaatattatgcaaaaactcatcaactaactaagcaagaagctgttacacaaatacataaaattgatcaacttgctgccgatattgatttaccaattaagatggaaaatgcgattcctgttaatacattagctgctcatcgcttaataaaatacattgagagtttaaatgaccaagcattacttaataaggctgttaaacgtctttatcaactttattttaatgataatgaatcaatcgcggactatgaagctctaactgttgcaatgaatgaaatcggactacctgttgctgatgttaaaaaagttcttgaatctaatcagtatgaagatgaagttcgaaaaaatgaacggcgcgcatttatgattggaatgccaagtgcaccgctatttgtgattaataataagtattcaatcactggtgcacaaccttatgaagtatttttagaagccttgaaaaaagtaaaagatacaactaaataagatccaatcaaatcagaagataatttctggtttgattttttgttccccctgctctatttgtaaatagaaaaactgtaattctttataaattctaatcatccgggtagaataagacttgaggaggttttgggaatcctaatcctgcaattcctatttatgccggaacagccgaattaattgtttcgctattatatctggcatcaggaatcgtctatatcgctacttgtggtattgatggtttaggtggcgatattgctggattatcgatgatgctaatcagttgggttttaggcttgttaacgtgtactatctatcttccattgcaactatgggcatggttggcgttaattattggagtcggcttctttgtctggcatattatgttacgacgtgaataaattatgctaattattgggcaatccaatgatgttcgcttttagcctacgttattagattgcctattttttctaataaaaaacagcgagtaatttttactcactgttttagactaattgggctagctggattcgaaccagcgcatgacggtaccaaaaaccgttgccttaccgcttggctatagcccaattatattaaaatgttgaacaactattaaaattgttcaatggaggatacagggctcgaacctgtgaccccctgcttgtaaggcagatgctctcccaactgagctaatcctccaaaaatgacccgtgcgggatttgaacccacgataccagcgtgaaaggctggtgtcttaaccacttgactaacgggccatattaaattaattaaaagcgggtaacgagaatcgaactcgcgacaacagcttggaaggctgtggttttaccactgaactatacccgcatatcagcgacgaatattatattatcaagttatcctataaaaagcaatacttttttcaaaaaagtttattttatttcaaaaaactaattaatggctgcgttagtactgcttgtcggaaacgtgtaggccagatctccccgggtaagaatattagctttcgtaccatgtcatcgttagctttactgagaccaacttcgagtagtattggacttcaacttgtctagcagccttatccagttaatttcagccttatagctacttcttgttcatcgatgcagtactttgccttagacttccttcagattccacctcacggtggacacccttgtcctcagctcatggttccgactactacggcccatagcggactttcaccacctagctaatacccatgccgggcgcactaaaaaaatttttagtcaaccataccagttgacagatatccaaaaaaacagctaagaagattacctcttagctgtttagccagatcgggaaaacaggattcgaacctgcgaccccctggtcccaaaccaggtgctctaccaagctgagctatttcccgaaatagtgccgaggaccgggatcgaaccggtacggttatcactaaccgcaggattttaagtcctgtgcgtctgccaattccgccaccccggcataatagaactggctaagcggaagacgggattcgaacccgcgacccccaccatggcaaggtgatgttctaccactgaactacttccgcaaaagtgacccgtgcgggatttgaacccacgataccagcgtgaaaggctggtgtcttaaccacttgactaacgggccatttttaaatatattaaacaatttttctcaaaattattaactcgtctttcacaacgttattaataataccaactgagctataaaatagcaagaactttttagaaaaaattaaaaaaagttcttgctattgttatgttttccttctaaaagacagcaaaaagactgaaaaaaactcatttctcagtctttaaaatttatatttttaaatcaaatgtacccccttatcaacataaatggtgtcgccagtaactccagttgataaatcgctcattaagaatgcacacacattcccaatttcgctaatagtcacatcttctccgtcaacagttcttgcttgggacatctttaaaagttcatcatgacctttaatacctgtaactgctaatgtcttaaccgcgccagcagagattgcgttaacacggattcgtttttgtcctaaatcccgtgctaaatagcgaacactagcttcaagggcagctttagcaattcccattacattatagttagggatagcacgttctgagccaaaataagttaaggtaacaatacttgcaggattatttaatagatttaactcattagcaaccttagcgacagcaataagggagtaagacgaaatatcttgcgcaattgcataacctttgcgactagcaccaaggattgaaccagctaattcttctctttttgcaaaagcaattgcgtgtacaattccatctacttttgtaaaacgttccttgataatcgtaaaggcttggtcaatactttcatcatctgctacatcacattcaattaattgatcttcatcatctactaaccgttgtaagctttttttcattctggaattctgataagtatagataacttgggcaccttgttcagccatcatttgtgcacatccccatgcaatagaacgcttattagctactcccataacaacgatcttttttcctgttaatatatttcccatattatcctccttaaaactttcgataacgtttttttctgtttgctagaagttggtttggcggtaattcttgcagcttgtttaatcgctttagtaaaacctgctcgatatttttgcaagttttacgatgctcttcgctttctggaataattccttcgataatcccttgttttaataaagcttgcggcaccatttgcattaattctgccgctttatctgctttcgtactatctttccacatgatggaggcaaacccttcaggagataaaatagaataagtactgttttctaacatccatacttcatctccacatgccaatgctaaggctcccccactacctccttcaccataaataatcgtgataattggaatggcaagctgacttatttgtaaaatgttttgggcaatcgcacttccttgcccattttcttcggcttccttgctaggaaatgctcctgcggtattaacaaaacagaatacaggtcgcttaaatttaactgcttgcttaattaagcggagtgccttgcgataaccactaggcattggtgagccaaaatgctttatgattttttcttctgttgtttttcctcgatcagtggtaatgacggtaactgcttgctgatggaaagtagcgattccaccaacgattgcaggatcatccccgcctgcccggtcgccgtgcaactcaacaaaatctgggaaaacattttgaataatctccatccccgtaattttattgtcattgcgagcacgtttaacaatctcgcttgctgataattgttcattcattagcaacgctccctgtttttaatagccattcaagcagctttttttcatcttgacgttttacaattcgatcaataaatccatgatgcaggatgttttcagctgattggagatcaacaggaatttgctgatgaatcgtctgttcaataactcgacggcctgcaaagccaacaagtgcatggggctcagcgagaataatatctccgtccattgcgaaactagctgttactccaccagttgttggatcggttaagatcacaatgtataaaaggccggcagcagcatgctcatttattgcttgtgaaatcttcgccatctgcattagcgacataattccttcttgcatccgtgccccgcctgaagcagtgaatagtactactgcttgacgatggatagttgcatattcaaataagcgcgttatcttttcaccggtaacagttccgagggatcccataataaatgttggatccataatacctagtgaaaatagctgatcattaattgaagcttcaccagttaggactgaatcattcagcttagtttgtctttgaagtttgctgattttttcttggtatccaggaaaatgtaacggattctttgtctggagatccttatcgaattctttaaatgaatctactaaccacgagagtcgatggcgggcaggtattcgtaatccatagtcacaattgggacaaacagcatattgtgttaactgcttggcgaatagtaattgatgacaatgtggacaccttaaccacatttgatctgggaccctttcatcagcatttttatctgctttgatgtgccgttcacttaaagtattattttgatcatataatttcacgctgtcagctcctttttccattgtggcaagaagaagtcttcaagaaacgttgttgaagctgttcctgccaaaaatttaggattgtttaggattgctaaatggaaattttgattggtcgttacgcccgtaattaccatttcatttaaaagtcgtttgattttttcaatagcttcttggcgatcttgaccaagggcaattaccttagcgatcattgaatcataataaggagtgatcttactgccaggataaatagcagtgtcaatgcgcatccccaaattaccgactggaagatataagtaattaatcgtcccagtcactggcataaagttttgtttaggattttcagcatttatccgacactcaattgcatgtccatgaacctgaatatcctgttgggtaaagggaagtggttcattcgcagcgacaataacctgtgccttcactaagtcgatcccagttaccatctccgtcactgtatgttcaacctggatacgagtgttcatttccataaagtaaaagtgatggtccttgtccattagaaattctattgtccccgtattatggtagttaatcgcattaatggctcgcattgcaatttgtcctagcgtttttcgctcttgttcatttactaggacacaaggactttcttcaatcaatttttgtttattccgttgaatcgagcagtcacgttcaggaaagaaaacggcattgccaaaattatcacgaaatacttggacctcaatgtgtttaacattctccataatcttttcaaggtacattcggtcatcattaaacgaaagtcgggcttcgttttgggcctcgctaaatatttgccgcatctggttatgatcgttaattcgtcggatccctttaccgccaccaccagcagctgcttttaacaaaattggatacccaatcttgtttgcgacctcaacagcgtcattaacattggtaatatagtcatcgcttccaggaatcacaggcacccctgattttttcatttgctcccgtgcatgctccttatttcccattaagtcaatcactgaggcttggggaccgatgaacgtaattccgcattcttcacacattgtcgcaaattccgcattttctgatagaaagccaaagccaggatggattgcctgggcacctgtaccaagagcagcttctaaaatgtttttcgcattcaaatatgaatcttgggcccgggcagttccaacgcatacagcttcatccgctagttgaacatgaagactttcgcggtctgcagttgaatagatagctactgtcttaattcctagctcccgtaatgaccgtattatcctgacagcaatttcaccacgattagccactagtactttggaaaacattaaaccacctacccaatcataaaagttaattcggctgtacaggcttttttgccatcgaccgttgcaatgcctttaccaattccaatatttttgtgaactttttctagtctgacttctaaccttaacgtatcgcccggacggactaccttacgaaattctgctgaccgaattccaccaaaataggctgttttcccttggaactcttcttgagataagagagcgacggcacctgtttgcgccaatgattcaacaatcaatgctcctggtaaaactggattttcggggaaatgaccattaaaaacctcttcattaatcgtgacattacggtgtgtaatggccttcttaccagggattaattcatcaacttggtcaattagcaacatcgggtaacgatgcggaaggattttttgaatttcagttatatctaaagttttattaggcattgtctttatcctcctgaactgagaaaagcggttgttctacttcaactaattcttcattgcttacacaaattgaagtaatggttccgttaaaagggctttttatctctgtcatcattttcattgcttcaatcacacaaacaacatcccccttttttacgtggtcgccacttttaacatagggatctgcatcgggggttggttggagatagactgttccgactaggggcgcagttatattttgcgaaggtaaagttagttgttcgtttgcttttttcttagctgaagtcgtttgctctgttttttcggttgttataagattttcatgcttgtgggtttgcttatttttgcttaaatagagctgaaaggaatcttgatttatttctaattcacgaatatcagaatcttcaaaattttgcattaatgtttgaatttctttaaattccaagatagatcactcccatttcttaaaggctaaaacagcattatgaccaccgaaaccaaaagaattgcttattgcgtaacgggcggttgaggcgttcctattttctgccgtcacaaggttaaccgagcattttggatcttgattaaagcaacctatattcaacggtaattgtcccttttgtaaagcggctactgttaagactgcctcaattgcgcccgcagccccaagcaaatggccggtcattcccttcgttgaactaacgcgaacattactatcggaaccaaatacctgattgattgctttggattcgccttcatcattagcatgagtagcggttccgtgggcattaatataggaaatttcgctaggactaattccagcttctttaattgccagttccattgctcttgccgcccctgcaccagttggatcaggggatgtaatatggtaagcgtccgaggtagcaccataaccgacaatctcaccaagaatgttagcactgcgtttttgcgcatgctcaagatcctctaaaacaagtgttgcaccgccttcacccaaaacaaatccttgacgtgccttatcaaatggcaaagaagctttaagcggatcagttgcttgtgataatgctgttaatgccgcaaaaccagcaatcccgatctcattcaccgaagcctctgatccaccagcgatcattactttagcgcgacctgctttaacttgacgaaaggcttcaccaattgcattagttccagtggcacaagcagtcacaatcgatgtacaaatattttgcgcattaaagtgaatggaaatattaccggctgccatgttagcaattgacattggaacaaacattggtgatacccgtctaggacccttatcatgcattttgataatttgctcttgaatagttgtcaaaccgccaattccagatccatagataacacccatgtcgactggcttggtatttgtttcgttaatctccgccatttccattgcttcaatcgcactttgtaaggcgtattgagaataaagatccattcggcgcgcggctttccttccaatgacatcattagggtcaaaatcgtcaatttcacctgccacggtaattcctgtcgacttggcatcaaatttcttgatcgctttaattccaactttgcctgcaaaactattacttataaattcttgaataccgttaccattaggagcaacagcacccattcctgttattacaactcttgtcatttagttcctcctaaattgtcatgccaccgtcaactacaatggtttgaccagtcaaataatcgttttctgctaaaaattttgcggtcttagcaacttcttctgactgtcctaagcggttgagggggatgcgactgagaatttgttcttttactcgctcagataatttttcagtcatatcactagtaatcattccgggagcaatcgcattgcaacgaattccacggcgtgctccttcttgggcaatagatttagtaaggccgatgatacctgccttgcttgccgcataattagcttgtcccgtattaccatggagacccacaatactagcaaggttgataatgcaaccgactctttttttgagcatcttcttaaaaataggttgcgttaacataaatgttccgcgtaaattaacattgatgacctggtcaaaatcgctcgctttcattcccatcattaacttatcattcgtgattcccgcgttattgataagaatgtcgatcttctcgtatatttgccaagccgctgctgctaattcactaactgattcttcatttgcaatatcgcccttaagatagtgataatccgcccctagtagatctagcttttctttaaacgtttttggtaagttatcctgccgcccattgaggattagccgactaccagccttagcaaactctaatgcagtagccgccccaatcccgcgtgtgcttccgcttataaaaacgactttatctgtcagttccatctttttgctcctttataaatttttcataatcagcaagattttcaatgtgttgggtatttaagtgctggtcaacttggtgagcgaagcgagataacgtctttccaggaccaatttccaatattgtgtcaattttcgcgtgcttgactaattccttaacattagctccaaagtgtgttggaacagctaattgtttttcaagaattcctggaagatcctcacaatgaaacaagctgttagtagtattgctaataacttcaatctgtggctcatggaagtcgactgcttgtaaccggttatgcatctgttgacgtgcaccgttaaagaagggagtatgaaatgcaccattaactttgagcaggatcgttcttttagcaagcttgtcctcttcaatctttttaagggtagcctttaaagcgtttaatgccccgcccactacgatttgtcgtggtgaattatagttagcaatataaactcgctgaccattttcttgttgagcggtgattagttcttttatctcttgaagttgaggatcaaggacagctgctaatgtacttatttctctatccgcgtcttgttgcataaagtgagcacggtccgcaactaatttaattccttcttcaaatgaaagtgcattactagcaattaaagcagcgtactcgcctaaagataggccaatcatccctttaattggtagttgaggtaaatcccgttttaacattcggtagattccataactaactgttacaattgctggttgaacatatgctgttttattcaactccttatgctcgtttttcataattttgagcaaatcaagttcacaaacagcgcttgcctgactaacaatccttgaaaaaagggagtcggccataagctcgactcccattcccgatcgctgtgcaccttgaccgctaaataatattccgtagtacattatttttcatccaactgtttctttacgaaatcaacaacgtcactaatagtctcgattccttcatcggcatctaattcaatctcaaacttatcttcaagctcattcataatttcaaaaacatcaagactatcagcatcaagatcatctttgattcgtgcatccattgttacacgattttcgtcaacatctaattcatcaacagtaatagtttttacagtattaaaaatttcctctttagtcatatccattcttctttctctattaatagtttaaaattattgttcctgtacttaacccgccaccaaagccactcattgcaataatgttacctggtttaatcaattcatgagcaatagcttgagtcaataaaattggttcactagcggcagctgtattcccatattcactaatattcattggaaactttgtaattggttgcgccagtctctttgcaatttgggtaattatccgttcatttgcttgatgtaataaaaaataatcgatatcgtctaatttcaaattagcttgttgaacggcagaagtgattgatcgtggtacttcatgagtggcaaagcggtatacgtcacggccggccatcgtaaatggtgaaagggatgttagttgtttagggaagccagttttaggcgttgtttttccggcaataattttatctcctaagtcaccaaatgtatggagatcacggccgagaattaaaggggttgttgtagttgtcttttgaagtaacactccgccagccccatcgccgaacaatacggcagtacttcgatcttgccaatcaatcagttttgataatacttctgcaccaattaccattgcatttttccaatgagagcttttcaacattaattcagctgtattaatggcatagataaaaccagtacaagctgctgagatatcaaacgcaattgcatttttcgcacctaatcttccttgaacaatagcagcagttgaaggagtataggcatcaggagacatcgttgcaataatgattaaatcaagttcagttgcctttaaattggcattagtcaataactgggtaccaacattgacagctaagtctgaagtattttcagtgttgctgatataacgttgatgaattccagtccgcgtcttaatccactcatctgaagtattcataatagttgataattgctggttagtaattttaaggggtggatgataactcgcagtactagtaattcttaaattttgcaatgtttgtcaatccttatctctaagcatgctcatccacaaaatcttctaagttttgcaaggcttttttaacaaccttcatttcttcatcatccattcctttaagaaaacgttcaaccatcatgttatgaaaggcccggtgcgcacgatatagtacccggcctcttttggttaaacataaccgaacaatgcggcgatcatctttatcacgaattctttccacatatccttttcgaattaaacgatcagccattgaagtcattgttcctggagttagatgaagcttttctgctacttgagaaattgtttgatggttatacatcgtaattgcatcaattgcatgcatctctttaattgttaaatcattgaatgtacttttccgcaattcattttcttcaatccatagaattccggaataaactttgattaatcctttattaattttttcgtaatcattatctttactcataatatatttcttcccttcaattttattctatagcccgaataatttgattatcaaaatatattataaatgataatgattcaccgtgctaaatcttttcttctcgttcagcaacgataaagacaagctccgcactacaagctaatttgccgttcacaagcgcttgtgtttctacaatccccattgatgatcgaacttttttcataacaacgtttagttttaatacatcaccaggacggaccatttgtcgaaaccttgctttatgaattgcgccaagataagctgttttcttataaaaatgcggtgattttaatatcaaaattgaagcagcttgggccaatgtttcgataattaaaactccaggcataacaggattattaggaaaatgaccgcgaaaaaatgattcattaattgtgacattttttgttgcggtaatcttttcttcaggaactaatttatctacataatcgatatagcaaatcggatatcgattaggaattaattccataatctcctgcgcattcattattgccaaaaagattcacctgccttcggaaaatatttcgagtatcaaaatattcgataatcaaattatattcaaaagtattttgaatgtcaaattattttcggaaaggtatcttttataactagtcgaaaataaaattatttatcatcttcattagatgctagaaaaggatttcggttaatcatgatttttttgcaattaataggaattttactattatgtcatttaatcattaactattaatcactttaaattaaaatattcctttactaattaattgagaattggtagaataatatttgttcgttattaacgggaaatagctcagcttggtagagcacctggtttgggaccagggggtcgcaggttcgaatcctgttttcccgataggtttagagagtcgttgaaagttttctttcaagcgactctttttagtatcaaggaggatataaaaatggaagcagataaatatttaaagctaattcaagaggagcttcagaaccttcctgattatgttaacgagtattatttagggaccaaccatgcagtcacaacaacctatcagtacttaactgaaatccgtcgattctttgattggttacggtcaagtggactcgtctctgttaattctaataaggacttaccaattgatacactggcgaatctacggcgtagcgatgtaatgttgtatatcgattatttgcagcatactaccaatgcacaaggacggttaaattctcctacttcaatcaatcgatctattaatgcattaaggtcattgtataaatttttaacagttaccgcagataacaataatggtgaatcttattttgaccgtaatgtaatgctgaaaattgactcccttaatgatacaaaaacattaaattatcgggctcatacgctggcttcacacatgtaccggggacaaatgaagtttgattttattactttcattgaaaaagaataccctaataaatgtgataaaagagctctcccctcttataaggtcaataaggaacgagatattgcaattattgctcttattttaggaacaggcgtccgggtatccgaggcggcaaatgtaaaccttggtgatttaaacttaaaacaatcgctgctagatgtaacaagaaaaggtggccagagggattcggtaccaattgctccttgggctattacttatatccaaacttaccaagcgattcgtgcacaacgataccacgctttaaaaaaggatactgctttcttcctaaccgtttatcacaagcaaactcgacggatgacagctaatgcaattgaaaaaatggtcaaaaagtattcaaccgcatttggccatcctcttactccccataaattacggcacacccttgcttctgaaatgtatgaggtaacgaaagatcaagtattagtggcccaacagttgggacaaaaaggaacatctgctaccgatttatatactcacgttgaccagaaacagcagcgtgatgctcttaaagaaattagtgaaacttcatataaaaaaacaaatgaataaaagccttttctataaagataatcttcgctataatgttaaggggtgtataatttttttatggaggagaaaattttgggctttattacctcactatttgggaaaaagcaatatgtttgtccattttgtcatgagcactatactttttctgcaatgcatgcacggaagttagctgacaaagatgggcaaatccactgttattactgtcgcaaggttttacaacaattgcattaaaggattaacgaggatttgtttttttcgataataaaaactttcaaaataaaaaaccgttaagctgaatttaaggcttagcggttttattttaaagtatttagttaactcgacgtttgttaattcctgcaagaccaaacatactaagcaatgttcccatacctaggccaatcatggctttattggcgttatttccagtttgtggtaaacgattattagtttgggtttcaggttgcttaggcgtttctggagttaaaggaacttccggagtattaggtgtatcgggagtttgaggtgtcccaggattttcaggagtctttggtgtttcgggagtattaggtgtctcaggggtttctggtgtagttggcgtttcaggatcatttggtgtagcaggatcatgcggttttaatccataaccaccaattaaatcccaatcaattggtttaccaaattccccaggtaaagcagctgtttgaatgtttcctaacatattattattgttacttgattcgtcccaaatccaatccccttggttagttactttagctaataccatagttgtatcatcaggattaatttgcacaataaaacttggtgcccatgttgaattcataccttttccagcaacttcgcctctatttgtcatatacgaagtaatgagtaattgattttcttttccttctactggaacagcatagtaagaataagtagcggtacgccaattggcaggaacagaagctgtcactacaacccctgaaccatttaatggtttatatggacctgtaagactatcggctacgtaaccaatcattgcaacattatctccgacaactttattagctttattaagagtatcgatattagttcctctgcttaaacgtgtagccgagaatagataatacttatctccaagtttaacaacattaggacgttcaagttcatcactaaccatatttgatgtaactaatggagtatatacttcttctacttgcgggttcttttcatcattcgttagtttaataattccaagtgccccgttagcaaagatagcttttttataatcaacatcactacttaaaagatgaaacaagctttcaatattaaagcgatcgttaccaccataatttgaccaattatataattgatcttcaccttgataattttcagttccagtatttccttcaaatactaaataccgatcaccatttggcatttgtacaacatgtccatcccgcaaagtgtagttgtcagcaaaactatttgcagctttccattgatcataagtttggtaatgataaccatcacctgcaaataccacatgattattctctacattattaatatggacaccatcattgtcggctgttaagtacatagtagcacttgctaatttttgatggttaatagcattatttgtatcattgatagtataaaagagttgaatagagttgtcagaattaacaatagcagacccggaccattcttgtgttagtggagattcattatatccaaatatagatcctgcatttcgccagtgtgaaaaatcattatcaccatacttattataaagtaaataaatatgattatcttcgtgatgaggccgtcccatcatagcgatcacaagttgatagccattccaattagaaacataaccagtcactggatcttgaactggccatgaatcccaaatatctaaatcagcatattcacctgtttcagcatccctagtatatgcagcgggcatattctttatttgacttgcattaaaataaggaatagcgtatttaggatcttgatcaactaaagcctcaccaatctttttaaggtcattataagtcatttgtgtaccagactttgcagctttcgagaagttcatcttatttaatgtaatgctttaatctggtcatcagttaaactattaggatcaatccacgccttttttacaacgttttcagcatccttgtttaacttagcggcagtattctttttactggattgttgatcatcgtttttggcagctgaagaatcattagtgtttacagctggttcttttttggcttcagaggattcgttagcgggtgcagctttttgtgtatcatcctctttggctacattagtattttctgtagctgctttactatctgtgttagttgatgaagatgctgaacttgtagatgaagctgttgcagcagaacttgctacttgactgttagaattttgtgtattagcggcagaagaagcactatttgcattagcagaatttttagtcgcatcactagctgcactaacctgaccactaccaagtgtcacacttttaacagcaatatcattatcccctgttgtaacctgtacagtagaagaatcattgttttcagtattcgtgtctgcggatgcgtttacagttgttacaccaaacaccagtgcagccgtagaaagtgtaacaactgcccaatttttaccacttttatacattttcttatgttccttgcgttctagcatagaaataaccccgtttctttaccttttttgctaaacgtttaacaattaactgtgcactattttattatgattatcttaaattatcaatagtttcttcataaaaagttcatatttaaatatttactgtctatttactcattttttgatatcaatatgcgtttttcttctgagacgaattgtaacgacctactactcatcaaaatgaatttcagttcgtctgagaggcaaaatccgtttttgcccctacttttgcgttatttcaaaatcagtaagactcttttgataaaagagtcttacggtaaccgagaataaacgttgatataacaagcttttaaaatcctatattttcgtgtgagactgttgtataattttattgaaaaagtgtctcactaaaaattaggtcatttttgctatttttggcggacaaaaaggagttatttcattttatgttatataatgcagcattagttttagaaggtggcgcattccgtggacaatatactgccggaattgttgatacatttctcgctcaccatattgaatttcgaagtgtaattggcgtttctgctggttcactttgtggagttaatttcgtctctaagcaatacggacgcgctgccaatattaatattgatcatcggcacgatcgccaatatatctcgatggctcgcgtatttaaaaagcaaataattaatcttgattatctttttgaagatcacggatattcttggcagaattttaatgaagctgcatatcgacggtcagcatctcatttcacagcagttgctacttctgtgaaaacaggaaaaacagttttatttacggatcctgttggtgaggagctaaccaatgccctcaaagcttcctcatcaatgccatttctttcagatccacaggaaacttctcaagggccttgccttgatggtgggatcacagattcaattccatttgatattgcacaacgacaaggctatgacaagattgttgttgtacggaccagggatattaactaccgaaagaagccatctagttctgctgtaaagaagttgtacgacatggtatataaagattatcccgaatttgctaaagcggggattgatcgtccccttctctacaaccaacagactgctgaaattaatcgtttgtcttgtgaaggaaagatctttaatattgctccctctaaaccaattaaaattaagcggattgaaggaaatattaagaaaattcgagcactttatgaaactgggcggaaagaaggagaggaaatcgtccctgctttagttgattacctcgcaaattaacaaaggaagaaatattatgtcaactaaaaaacgagtttatattcccaaaaataaaactaatggtcaaatcaagggtaaacggaaaatatgggtagaaaatgttaaattcttgactctcgaagaatatgatcagttacgtgagacaattaagctgcattcgcgtcctgaattggttaaccgaaacctattactaattgcaattgcccttaataacggattgcgagcatcagacgttgtaacgttaagggttggtcatgttctaaataaaactaaaacccgtgttattgagcaaaaaacaggtaaggctaaaacgctcttttggaataattgtcttgccgaaattattgattatcttaatgacttgaattataaagacgagaatgattatcttttccctgggaaacaagaaggtcatttttcagtacatggcttttacgaaatgttgcaacgaatggctagaaaaacggaaaataataaaatcgttgctaaaattggaacacactcttttagaaaaacttttggtcgacaactctataagaaaggtgttaacgttgaaatcatttcgcagttatttaatcactcctctgaacgaaatacgcgccactatctagggattgaacaagaagaccttgataaagttgttcaaaatttcaaatttgaatagttattattctgaatattatgtaaactaaaatatttaatcgttttcctaatagacttaggaatataattcattagaattaaagtaataaaaagtattggatgtgattaaatgaatataaaaagtgtaccaaagaagcaactatggggaattgaattaaatctgatttctctcctatttagtagtattagtccggttcttaataaattttcacttactagcttgagtccggttgttgggggaattttcactagtgcgtttgctgcaatttttacttttgcaacaatccttattactcgtcagcatgtttctttaaccaaccttaagagcctgtggttatggcttttgggtggaacaaatgcaatcggaattattcttcaatatattgctctttcaaccttaagtccaatcactgttacccttatcgctcggatgtatttagtttatgttttcttcctatcttatatcttcttaaaggaaaagattacaaagtgggattacttagcaattattctttgcattctcggttctttctttatttcaggaagccgacttcaatttagtgataaccttcttggattgatttgtgcattcatctacccactaatgtatgccgccaacaatatcgtggctaagtatctagttagtgatgaagagccaaataatgtcttgttctttaaccattttacttcggctcttttacttttctgctatgctctcataacaggaacgtcatttagccatatttctagtcaagcagtcgcatttaactttggcggagcattctttaatggtttcatgtcactacttcttttctatactagcttgcagtttattacagctggtaaagcaaatattgttcgtgcacttggtccagtaattgttattatttactcttcatttttctttcctgttcaggtaactccttctctagttttaggagcaattttagtaattttagctagtgcaattgttacctttacaagaacaaatcacgaataatcgtaatcgagtaggagataattgattagttcaattatcgacctctcacaccaccgtacgtacggttccgtatacggcggttcgacaacttaatcacattgaattgactggagcgtcttggacatattcataagtccgagttgttccagttttctattagttagagaatagctcaaggtcttactgtgtgcagttcgccagtagcccttgcgggtactagcgaagacatatgcatcacgctgggacagccccagcttctgtaagttagttaccttagttttaagcttcttccattgcttccagatatactgtcttattcgggccctcaaccacttgtcaaggcgttgaataaagtcagttagtttcccaattgagtagtactgaagccatccacgcatttttcgatgaatttcttcaaacattcttgtcagggatattccacgattacgtttagttaataacctcaatgctttctttactcgttgttgcgattgttttgctggacgggcgtaggctccattgtggtctacacccaacgaaaagccaagaaactttaaccgtagcgggctaccgactttggttttatctgggttcactttaactttcaatcgcttttcaagaaactgggtaatgcttcgcattactcgttctccggctcgttgacttttaacataaatgttacaatcatccgcatagcgcacaaagtggtgaccacgtctagtcaactctttatccaactcatttagatagatattcgccagtattggtgacaatggccctccttgtggggttcctttttcactcttagcgaaaagcccatggtctaagactccgctagttagaaacttacgaatgagccttagtgtccatgggtcatcaatatattgttgaagatacttaatcatcaagtcatgattaacattatcaaaataggcttttaggtctaagtcgacaactcttcgataaccttgattataaagatctactacttttgcaatagcgtcgtgagccccacggtgagggcggaagccaaaactattatcagagaaaacacgctcaaagataggtgtaagaatttgggccacagcttgttgaaccattcggtccaccactgttggtattccgagttttcttactccaccattaggcttcggaatttctacccgtttgactggtgctggtttatacttgccctcacgcaaactagcgatcaattccgtcttattttctctgagatatggcagaaggtcattgactgtcatatcgtcaatgcctgctgcccctttatttctcttaactcgcaaataagcctgattaaggttattgcggtccaagactaagtcttggatagtgacactcatacctttaccttcaccataatcggtactacgcgcccttgtgtactttcggttttccaaacctatcctcgacaagcggtcagcttgttgttctgttttctgcgattgtcgcacctgattacacctccgatataagttacaagttattgtcgttcagtccttcatctgattactcagactactatgacctcggctgacttctggcttactcaacgctacatcactgcaccgcttgtttctgtggaaattaaacttattcctcttgtcggaaacgtgtaggccagatctccccgggtaaggatattaactttcgtaccatgtcaccggtagctttactgaaagtaacttcgagtagtgttggactttaacttgtcatgcagtcttatccagttagttccagccttatagctacttcttgttcatcggtgcagtactttgccttagacttccttcagattccacctcgcagtggacacccttgtcctcagctcatggttccgactactacggcccatagcggactctcaccgcctagctaatacccatgccgggcgcacatataaaagcatcagaatttccctgtaaagaaatctgatgcttttattatatcttcttatatattaataaacccttgcgcgtcgacgataaacaataaaacgacggaaaatatattgccaaggtagcgttaaagcgtgaaccaaccgggtgtatgggaagtaaccaaaaattgctaatccacaaagaacatgaattttataaattaatggcactgaacgcatcaattgccattgaggattaagaacaaatagacttcttgcccatggactaattgttgtccgataattgtaatcaataaatgcacccgtaatagtacatgctagacctaatgcaattgtaaccaataaagcccagtcgacaataatatcattgatatcacttgtcttataaacacgagaacaagtcattcgccgataagtcaaaattgcaattcccacaaatgcaaggatccctgctggaattcccatcattaatgaaccaaagatgtggtacatgtggtcagtaatgccaaagtaagcagtccaacttgctgggataaacattcctaagcagtgaccaaagaaagctaaaataattccaatgtggaaagtaacacttccgatcattagccatttcttttcaaaaagttcacttgatttggcagtaattgagggatgaaaatatttaaatctagcaaatgttccaatgaaaaatgatgccaacattatatatggataaataacccataagaaaattgaccagccattatgcatcttcttgcacctccattttaatacacgaaccaattaatgaacgtgtaagcctgattaactgaatatagggactatcactatctgtcactgcattttttaaaagggtataagttccatcttcaatcacacttaatgctaattggatatcctgacgacgcggatcattagtataatcgccatatgctagaaattctaacaatagaggcaaataatcagaaagttcactggtcgcctctgatataccaaacatctcatatagcattttcaaccgtgctaaaatggtccctcgttcacgggaatcggtcatcttatagtatgacatataaagagtataacgtcggttcatttcaaaaaggtgagcgtatatctcttggacttcgattgaagatagtgcggctaattcatcaaaaaggcttaataattctccccgcgttgctgttgataatgcgttatctgtaagtaataattgacgaatctctggtgaaaacgtttctgtatcaggatagtcaatcaaacgggaaagaacggcaaatgtatcctttaaatctgtcaatcgtctaaaatcaatcacgccaaatccctccatagaaactatcagcataaatctgattagttgatttgccagcttctgccttcttaaacatactcttgtgttggggagctaatgcacagccttcacattcatcatagccaagactaccttgttcggtttgtgcatcttccatttctgccttttggctacttggaataacaaagcggtcttcatatttagcaattgccagtaaacgataaagtgatgttgcccgttcttctgttaaatcaactcgttctagtttactgctatcaaaatcccgaccactagtcttagcacgcatgtatagccgcatcattgcaagtttatataaggctttcttgatgacaggaacgtttccagcagttaatagacttgccaagtattgaacaggcacccgcatttgatcaattcctgggaagatcatttcaggattctttattgagtcccgtccttcaaagtaactcataactggtgatagcggcggaatgtaccaaaccattggcattgtccggtattctgggtgaagtgggaaggcaatcttttcttttactgccattttatagatcggtgacttttgtgcagcctcaatcatctcttcagaaatgccatccttgagtgcttgcttgacaacttcaggatcgttgggatcgaggaataagccaagttgtgcttcatacagcttactctcatcaggagttgatgctgcctcttctactcgatcagcatcgtatagaatagcaccaatatatcgaattcgaccgacacaggtttcggcgcaaactgttggttgaccttcttcaattcgcggataacaaaaagtacatttttcagccttatgagtcttccagttaaagtagaccttcttatatggacatccagtcatgcaaaaacgccatccccgacagcgttcttggtctactaaaacaatcccatcttcatctcgtttgtacattgcgcctgatggacaagaggctacacaaggtgcattcaaacagtgctcacataatcggggaagatacatcataaaggcctgctcaaagttatttttgatatccccttcaattttttgcatgttaggatcctgttggacatattcagttgatcccgctaagtcatcatcccagttaggaccagtggttaattccattccttcgccagtaatttgcgacttaggacgagcaacaggttggtgcttttgttcagggccaaataacgtcttataatcataggtccatggttcatagtagttatctaactctggcatatcattattgtaaaaaatcttaccaagagcgattttatttaatttgcttccagcacgtaattttaatttaccttttgaattaagggtccatcctccatggtattgatcttcatcttcccagcgttttggataaccgacacctggcttagtttcaacattattaaaccacatgtattcagcgcctggacgatttgtccatgtattcttacaagttactgaacaggtatgacaaccaatacacttatcgaggtttaagaccatgctgatttgtgctttaatcttcactccagttcaccttcttcaactttcttacatttgcataaagatcacgttggttcccagttggtccatagtaattccaaccgtaactcaattggccgtatcctccaaccatgtgtgttggcttaacgtggatttgcgttggtgcattatgtgatcccccacgattaccggtaatggtagaaagaggttcgtaaatttcgttatcttgggcatggtacatgtacattgacccctcaggcatccgaacagaaacaaccgcccgcgcagtaacaaccccattacggttataaacttcgatccagtcgttatcttttaccttaatcttatcggcatcttggggactaatccaaatagttggaccaccccggaataatgtcaacatttcaaggttatcgtagtacatcgtatgaatattccatttaccatgaggagtcatatatttaagtgtaacttcatcttttactggtggaacatcaatatctcctggggccattacaactggtggtaaggatggtttataagttgccatattttcaccaaattcacggaaaatttcatgatcaatgtagaaatgctgacgacctgtaagagtaaatgtaggaatatttcgctcagtcattaatgagaatggtgtgtagcgagccccaccatgtttagcagaagttccgattggtgttggataggcttcttgtggttgagcagtgatttgcttaaatgacattgaatcatcagcatgaccacggccaatatctgttaaatattcacccgttcgctcttgcttcttttcccaggctcggtcagcgagtttaccattggaagcagttgacatccgtaagattgcatcacatactttttcatcttcatcaagtaacggacagcctgcaccaatgccttcgctggcagttccatttatttcctttaaataatcatattgatcatcgactttatagccatagttattcactatattaggtccaagggtaatgaatttatcgtaaatcttggtgtaatcacgagtaactaatttcaaggaaggcattgtttttcctggaattggttcagtttcaccattcttccaatctttaatttccccgtatggttgagcgatttccccttgagtattatgtcctagtggtgcgctcttaagatcatagaaggttcccggcatgtatttctttgccatttcagaaacagtttttgctaagagcttgaattgttgccagtcagactttgattcccacattggactaactgctgcattaaatgggtgaataaatggatgcatatcagttgatgaaaggtccttcttttcataccaagtagcagctggtaggacaacatcggagtacattggtgttgaaaccattcggaagtccatatcaacaacaagatctaacttaccaattgctcctttatcacgccaaatcatatcctggggcttaactcgatcattaggtttagcaagcaatccattttcagcgcctaataaatgtttcataaagtattcggcacctttgccagaagaagcaaataagtttgaacgccataagaagaacgctttaggttgattttggttagcatcaggatcttcagcagcaaaatgtaaagagcccttcttcaattcatcgacaactttctttgaaatttcattaatatcagttgtattgtaatcttttgcaaaagataacggattacgatcaaattgtgggtatgatggtaaccatcctaaacgaattgccatttgattataatcagcattatgtaagtaggaatgtttactcttccaaacaggtgatttttgagcttggttatcaatttcttcataacgccattgatcagttgcaaagtaataccaagtagtaccttgcatttgacgggcactacctttttcccagtcattagcaaaagtaatatttgcccaaccctcttgtggacggagcttttcttgaccaacgtagtgagcccaaccaccaccagtcataccaacacaaccacacaacatcagcatattaataatgtttcgatagttcatatcggcattgaaccagtggttgactccaccacccatgattaccatactccgcccttcattttcggccgcgttttgggcaaattcacgagcaatttgaataacttgctctgcttttactcccgaacggctttcttgccaagcaggagtaaagtaactctcagcatccattgcatctttagcagcaagttcatcattaccagtccgattaattcccatttgagccatcatcagatcataaacattagttaccaagtgttctttgccatctgtgaatttgagctttttaactggtaaatgacgttgcacaacgctgtttccgtcattactaaacgctggaaaatcagcaataatttgttcagtttcgccatcttgatcattaatagaaagtgccggatcaatcttattaccattttggtctaataattcaagattccatttttccttagcattatattcttgtcccatcgttccatttggaacaacaatcttgtggttattttggtcataaacaactgtcttccatgctggattgacaatcgtatcatcagcaactaagtcactaatccggacgaagcgacctggtgtatagtgatcaccatttgctgtacttggttccaattcaaccataaatggtaaatcagtaaatcgcttggagtaatcaatgaaacgtttaactgggtgcttttggtagaattcatctaaaattacataagtcatcgcttgagcaacagcagaatcactacctggttctggtgcaagccaatcatcagcaaatttcacattttcagcataatcagggctaactgccacaatctttgttcctttgtacctaacctctgtcatgaagtgcgcatccggcgtccgagttaatgggacgtttgatccccacataataatgtaagaactgttataccattctgcggattctggaacatcagtctgttcaccccaaatctgaggagatgcaggtggtagatcagcataccaatcgtagaaactcatttgttccccacccattaaggcaatgaaccgtgctccggcactaaaactcatcattgacattgcaggaattggggtaaaaccaccaatgcggtcaggcccatacttcttaattgtgtataagcaagcagctgaaatcatttctaatgcttcataacgatgaacacgaattaagccaccgtgtcctcggaccttcttatattttttagacttttctggatcttcgacaatacttgcccacgcatctaagggattttcatgttctttcttggcagcagtccaaagctcccataacttgccacgaatatatggatacttaattcgaacgggactgtattcataccaagagaaactagctccccgaggacatccccgtggttcatatcctggaatattaggtccgcatgatggataatctgtggcttggtgttcccaagtaataattccttgcttgacataaacattccaagaacacgagcctgtacagttaactccatgagttgttcggacaactttgtcatgcgcccatcgctggcgataaagcttttcccaacgacgactattttcttcaagttgtgtaaaggttccattaaacttatcaaccttgttaaagaaccgtgacttcatcgttgattgacctcctttattgaatggcttaccaatattaaaaataaagtaagtcttttccctaatgtaaagattagcaccataactgctatactacgactagggaaatacctatattttgaactaaatgaggtgctaatatccatgaatcgttatgatcgtcaagaaagggtacatcaaattggtagtattggtcagcaaaaaattagccatgcaactattatgattgtcggtgtaggggcattgggaagttatacagccgagcaacttgtccgtgctggagttaaaagacttatcttgattgatcctgacactgttgacgtaactaatcttcaacgtcaatcgcttttcaccgaagaagatgctagccaacaacggcttaaggtagaagcagctaaagaacatttacataaaattaattcagtatgtcaaattactgcgatcccagcgccgattactgctgaccttattgacgaatatcagtttaccctttgtttagactgtcttgataattatcaagcacgggatctattaaacaaattagcaatcatcaaaaactttgattatctgtttgccagctgtgcaggaacctatgggaacgtaatggcgatttcgccacaaaatcatccctgcttgaactgtctttttcctaatattaatgaattaaaacaaaacgattgtgatttaattggggttaatactgctttaatcccgattgtggcgggactacaggtatctttagcgcttcattatctggttgacaaaacacaggttaattttaatgaattgatcgcggttgacaattggtcaatgcaatttagtaagtttgctattaataaaaattaccattgtcccgcctgtgctaagccaagcagtatttctttagaagaagaatcagcaccagaattacatatattatgtggggaaaatgcatattatacgatcaaagagaaacctattaattttggcagacttaaagaatttttggctaaaaaagagctcttaatcaacgcaaatcgattgtttcttcattttaaatgggaaaatcgtccagtaagtatattcaagaatggtaagattgttatgtatgacttacctacttcggcgattgcccagaaacagtttaagtcgttaaatattttgatgaaagaagacctattatgaaaaaaatcgcaattttaacggttagcgatagccgaacattagatagcgatacttctggaaaattaattgctataaagatggctaacgcgggcttatcagtagttgatcgggtaatcgttaatgatgatattgtcaatattcaaactgcctaccttcaactagaacaacaagctcttgatatcatcattactaatggtggaacaggaattgctcagcgtgatgttactattccggctatccgtccactcctcaaacgtctaattccgggttttggggaagcgtttcgccagatatcttttgatgaaattggtactcgtgcgcttgcatcacaagccctagccggatttaatttccgcaatcagcttacctattgtttacctggttcccagaatgcctgtcaaacggctctaagtaaactaattttgccagaatatgaacatttattatttgaaagcagttctcaacgaaaggaagttcatcaccatgctcactagaagaattccaatctctgttgccgaggcacagaaaaagattaacgaaattccccttaaaacagctacagagacaatcccgttatcagaagctgaccaccgtgttttagctaaagatgttcatgccaattatgattatcctcattttcgacgggctggaatggatggttatgccattttagccagcgatgatcatgacttccctcgcgaatttaacgtccgaggagagattcaagctggagcaacttgggatcaaccattacaatcaggggatgcggtccgaattatgactggtgcatatgtcccttttgatgtaggaaaagtaattcgaattgaaaaaacgcggcccgctaaagatgaaaataaggttcaaattattacgactgaaagcaagactaacattacggaagctggtactgatgtaaaaagcggtgatatcgttttagcaaaagaccaggaaataaatcccggtggcctagcagttttaacggcttttggtgttcaagaagtaacagtttataaaaaaccacggattgcaattatcgccactggaactgaattattaggacctaatgccacgattgaaccgggaaagatctttaatagtaatggtattatgttaaaaaatctggtagaagaaactggtgggattgttgattttgaaacccaattaccagatgatgctgatcttatcaagcagactcttgaagaacaaatagcaactcatgaaattgtaattactgatggtggtgtttcagttggtgattttgattttattggagatgaagcacgtaaagctgatgaattgctttttaataagattaaacaacgaccaggaagcgttacgactgcctttgttcaaaataatacgttaataatggctctttctgggaatccaggagcttgttttactggtttttacctttatatggaaccgctgattcgccgttatcaacaccaagccagccgaattaagcaagtacgggcaatattagcggccccatataataaaactaacggctttgatcggtatcttcgttgtacttatgaattcaaagataatcaattttatgtttatccaaatggaatcaacagatctggctcattagctaacctccagacgacaacctgtttagcactgattccgcatagtactactccaatgaaggtcggaacggagacagacgcatggctattacccttcaaataatcggtcataaaaaaagcggcaagactcttatcacgacgactttaatcgaaaggctctcaaaagaagggtatcgagtagctgctcttaaacatgatgcccataatgccgcaatggatgtgccaactactgacagtgctagaatgagtagtgctggagctaaacaggttattttacaatctgcgactgaatttttctttcatcaaaaaagtaatgttccgtctttaacggaaatggttgaattattaagtaccgataatgattttgtcttgattgaaggtcataaggaagccactcaatatccgcaaattttattattaaagcctggcgaagatcctaccaatgttgctcatactccccctcttaaaataggtagtatctttaatggaacaaccgctgacttattaggaaaagatgcaattgtaaattggtgctatgactacttaaaacaagtaaagggggatgcaggatgattggattagtatatgctggtggtaaatctacccgttttgggaaagataaagctacttatcatgttccaggattaccagctaccaatatagagctagcagtcgagaaattaacacccttttgtcagcaaatcgttgtttgtgctaatgaaataaatcgagcgcatatattaaagttggttggtcaagaaccggctgtgcagattatctgtgatatttccccttatgatcatcatggtcccctttcagcaattattgcttgtactagtcaattttccgttgttcaagactatttaactttggctgttgattatccatatatcacaaaagatgtacttgctgttcttgctcgtacgtccaactcttatattgcaacaagtcagcacaatcactattcattagctcatttttcagttagcaatgaacaagttactacttgggttgataataatgatgactggcgattacgtagtttcatcactaataagtgcgtctgccacccccttaagtatcgctcaagtaacgaattttcaaatttaaactatcgtgaggtcgatttaaatgaaaagtaaagattcaatgacaaatcctgattttcaaaagctcatttcccttgttttaaatgacttaacaattagacgaacaatgctagaaaatcgggaacaagaagtaagccaacaaatgagttcgctggaaaaagatgcggagttagaacaactggacgaccaaattcaacagattcaagctgattttgatcattaccgcgaatttcaggatccgaaatttgattttagtgcaactaagtatttccagggaccatcgatgggattaccacgacatccttaaaactcagacggcagggctaaagaagcagagcttttcttagccctgccttttaagtgggccagcgttgcttctaactcgagaaaacgttattatataaaataggaatattataaagacaattaattggggaggaagcagatcgtgcttgaaactgctaattggatacaaaaatattttaatcaatcaccagatgcaatcttcttatttaaaaatgatgatcttttagttagtaatgagccggctcagcggttagtaactatgcttaatttagatgttaattacctactgcaaattggtaaaaacgcttggtcacaactagaaaatgatgattgtgcttcatgcttgattaaaaagcggttaacgggagctaccgttccgataacgtttcactccaacgctactcatccttttcatttttcaatggtttatcgtcctcttgacgataaagaaagtgtctttgccctgactcttgaaaatcgtgagcaacagcaacgcctttcgcagattgaagagcaccgaattctcaatcaatatgtcaatgaagcacacgaaaaggaacggcaaaaaatctcacaagatcttcacgatagtgttgcacagggaatctacgccgcaataatgggcgttcaaagattagcaacggtgcaaaagcaacgaaatactgagcaatttcaatcaatgagtgctgcaatcgaaaagcaattacaaacgacccttaaagagattaaagggctcgcacttgatattcgcccctcagttcttgacaattttggcttaattccggcaatcaaagctttggcgaaacgtcttcaaaatagtacaggaatcacaattgatgttatagcccttacctctgctgaaaaattacaaaaaaacattcaaaacgttctttaccgcattacacaagaggcaattaataacgcaattaaacatgctcattcaacagaaataagtattattgttacggatcacaatagttaccttcagttagagattcttgataatggaattggatttgatattgatcagcatagtggatttaatgggcattcacttggattaatgaatatgaatgaacgcgttaaggcatataacggagcctttacaattacatcaaaaattaataagggaacgacagtcaaggtaaagtttccctataataatgctttaaataaggatatggtgagaacaaatgtataacgttttagttgcagacgaccacgcaattgttcgctcaggaatttcatacttagtcgatcttcaaccgaattttacggtggttgatgggacagcgagtggaactgatacatatattcgagttgaacaaggcggaattgatatcttaattatggatttaagtatgccccctggcgaaaatggcctaattactactcgtcgaatccatgataagtttcccaaagttaaaattatcattctctcgatgcatgaagaacaggaatatatcaacaaggcaatggcaaatggcgcaatgtcttatattttgaaaagttcaccagatagcgaaattgttaatgccctaaaacatgttataaatggcgagaaatatcttgatgcaaatatcattgttagtaagacagatattagagaaataaatgcatctggtaataccttaaaattaaagggctataatagtctttcaaaaagggagaaagaagtctttccacttattgctttagggtattcaaataaagagatctcacaaaagatgtttatttcaacaaagacagtggaagcccataaagcaaatatttcacgcaaacttcacttacatggacgggttgaactagtacaatatgctattcatcaccatttaattgacctttaactaggcggggattcttaattaggaagaatccccgattttatttacgtcgatgtttttctacaataaagaaaatacgattaaaggagtggattcctaatggcgacaaacctcagtcgagatgatgaattacgaggaattcttagtgatattgctcgcaaacgttttactaatagtcgacaagttaatcccgtttccaacctgtttttaacaactaaatatgcagttgaaaaccaatatatttctggagcagttattgacgaatcatttagttcaacattagcagagataaatttaaaagatgctgctttaactgatcgcggccgtaataagcttgcacaacttcttgctcaatcaacaaaggagaattaattaagatggatattcaagataagctaaaacgagattacgaaaataaatcgatctatactgcaggcttttacgcagatccagataatgaacttgcaaatcgtagaaaattatttgatgccttaaaatcattagtcgagaatcaagaaacaaccaccccgtttgccttacaaatcatgcttacaaatggtgaaattaatgtaatgcccctcggccttgttgatcttgatgaacttaaaaattatgaaaatgagcaacggtccaagcacggtctagatgaacataacgatgatattcctcttctaattcaatatgcccctcatgtagagaaaaaagaagtggttaaaaaaagaataggcaccgttcaagatcttttcacaaactttaatgaacaaattgaaaaaatatggcaaactgttaaggaatttatgcaagataattttgctttactaacgattatcgaaaaggatttgattgcagataatcagaatgtgatgcaagagtatcagatcactttttctaagatgactgaggcggaacgaaaagaaaagctgggatttagtgttccagaaaatgaaattaatcaattctgccactatatggctgatatgcatgaagttcaagcaatcgtattatctgcgggagcctttgctaaccatgagcttcttggtaaaaattcctttactgaaatgataagcgataatattcgacggagcaccctcttttgggttcttgataataccttctacgaaatttattactatttctacatgagcaatgacaacgagaagctacataagcgacttaaacatcaacgagaagctcttatcgttaatatgcgtaatgatgcttttcaccgtgcacaagaatttactgagaagcaagtaaaaaatgttgattttaatgagtatttcagtgatatcttcatccccgttgctgaacaaataattgctgaagtaaataaatttaaggactgatactgtgaatttaacgccagatgaacggttggtagatgcattaacaaccgttatttatcaatatccaccaatggttcgcgaaatgattaacttgagtactggtgaagaagaacggcggctaaggttgtcgctttttgaggcttttagttatttcaacgaaaaagatctcacaattgatcaaattacagctgctcaactaccagaactattggcattagcaactcatttgaatcctccttcttttcagccaaataacctaactcctgggaaattcgctagtcaaaaagcttattcatatgttgcgagctacttaatgaatcgctttgtccgttcactaagtactgtaggtaatcctccacaaataattgaggagttgacaactgacgctggagatgtgatgcttgcacagattcgacggctacagtttaactataatcagcaatttaaggtagctgactatttagcagatgttaaagcacgatggggattacttggaacaatgactgcaaaacaaagtgccgtccttagcggagcaaaaagggaaattgtttcacttgcaggacagattggtcaagcctttggtactgctagttatattacatatgagtttcaacaactcagtaatgatcccgactcatttgtaaagatgataacgagtggtcagtatcccctggcacttttattcgcgcgccaacagaatccacaatggtttagtgatttcttcgcttcagatcatcgtccttcacaagcgatgtttaagcaagcccatcaattagcacttgaacgaattgatgatgtcaagcaactaattgatgatatcttctcccagctaatccttgatattaaagtgttaccagctggccaaactcaggatgaattgtttcgattagttgaaaaattaaaaaaagaataatttaaaactaaaaatggagattagggaaaaattaccctcatctccattttttcaatgtattatttaacgatgtgaacatcaccatgaatgtaatgtttccatagagcaaaccagcaaattacaccggttaacgctaagagtgcaattccaagctcataactacctgtccattggtaaatataaccaataattagtggtggaaagaaacctcctaagccaccaactgctccaacgaaaccagtaaccgctcccgtattaccttgggatacatatggaaccattttgaagacaaccccgttaccaatccctgcagaaagaccaaccaaaacaatccctgcgataaacatgaattgattgtgaaaactaagcataatccaaatagcaaaaataacgattgctacaaagacccattgtaataatgccatggggcgttttctatcagcaaggtaaccaccaaatggacgaactaacgtacatacgaaagcaaataatgctgaataaaggccggcagtaacaggagtataatgaaacatccctgtcaagaatgttggcgttaagtttgtaaatgcaacaaataagccaaaagtcaagaagtaaaatagtgatagataccatgttccactgtccgcggcaacagacaatgcgcccttaatcgttttacttttatcaactggcatttctttacaaaaaactgcgaaaagaacaccaaagatcactgtaagaataatcaaaaagtagtaaacactatcaaatcccgctgccttggaaatataaggtaaagtcatggcagccacagcattccccatattccccattgaaacgattcccagggctagtccttgctgttctggcggaaaccaaactgaagcataagaaaccccaacggcaaatgatgttcctgacatcccaacaagcaatgcggcaaagagcaacattccaaatgaatgaacatgtggaatcataattagtggaatcaaaataaaggccattaagatcaaataaacctttttcccgccgtaacgatcacttaagatccctactggaattcgcataattgatcccaaaaggactggtgtcgctaataacaacgttcgctgcgatacatccaaattgaacatctcagcaatttgggatgcaagtggcgcaaagttagaccacgacataaaacaaacaatcattgcaagcgtggagaggatcaatgcagtataagcatttcgcctactcccatgagcaacatctttaacacttgacataatcaagtcctcctcctatgtaattctaactatcttctagagtaatctagccaccactaaccggcggaatgattgcgatttcatcatcggcctctaaggtaattatatctgcgttaacaaattcttgattaattgctatccgcgaatttgctaaagttgacgtcagttgtggtgcccgctggctaatttgcttaagaaggtcatctactcgaataggattagcaacatcaagagtaatagatggtcctaactgatcttgtaaaaacgcaaataatttaacgttaatttccattagtttccccaccttaccttatctgtatcatattcctttttccagattggtacttcatgcttaagtgtatcaatcacatgttggcaccatttgaatgcttctgcacgatgcggagccgccacacctacaaataccgcgatatcagtaagcgtcaattcgccagtccggtgagcgacaacaacgcgtcctccttgttcttcaatcggtgctgcaattttttctaattgtttttccgccatgggatgataagctgaatactcaatcttagtagtctcgatctcgccagtccattgacgaacagtgccgacaaacatatcaattcctccgtattctggagcaacaagctgtttatacatctcacttacatcgatgggctcatcgcttattcgtaaataatgcaacaataatcacccgcctttatcatgcttattattacacacgataatggccctttagaattagtcaaatccctaataataggattttaagagacttgttatactagcacctgaatgaaaggacgattaatcaatgaatactttaattctctacgatacactctacggtcataacttcgaattaggaaactttattcaccaaactatccttccgtctgccatttttctttcttttaaggaggccttacaagtaaaattggatagtattgacttgcttatcctttgtccctgtacttatggcgaaggacaactcacagcctctgaagaaaagttctataattatctttgtcagttttctgtcccgaggctggtttattatattgcaggtgtaggagataaaaattttggtccagcaaaatttgctaacgcagtaaatatttttaattaccaattgcgtcaacatggtgcttcaccattagcgtcttcattaaaaatcgactatgaagacctgccaaccgctcagcaaacagttactgatgaaatcactaatttcttaagaaaaggaagagattctaattactaagcatcattatcatctaacactttttactgcaattttgttggttattgttacaatcgttctcgctctttcttgtgggcggatctattattcaccaatcataatctttcaaacgctacttcatccccaaagcaatccagccgcagcaaacattatttttagccttcgtcttcctagaatcatcggtgcgctgttaattggtgctggtctagcaatggctggttgttctttccagagtgtttttcataatcctttggtctcgcctgatattttaggggtgtcgtatggttcggccgccggggctgctagtgcaattctcttaggctatggcattggacttactcagctttttgcttttgttggtggaattattgcggtcagtttaactttattgattgcccaaatccttcatcagcgcggaaccttaattctagtattagccggaattgtgatttctggttttatgcaggcattagttggattactaaagtacattgctgatccggattcacaattacaaagtattgtctactggcaactaggcagtttagcaaaagttgatttttcaaatattatcgctgtccttccctttttgcttgtaggtacaataattctatttgtccttcgctggcatatgacaattctttcacttggcaaccaacaagcgcgcctagaaggaattaatgtggatatggaacaactactgataattaccgccagcacgtttttaaccgctgcaacagtttgtcttagcggaaatattggctggattggacttgtaattccgcatattgctcgacttttagttggggataatacaaaagaaacccttccccttgcagcagttattggtgcgctatttttgttaattgtcgatacaatggctcgatccctatcggcaggggaaatcccgttaagtatcctaactggcttcatcggcgcacccttatttgtttatattctaattaagaagaaggtgcaattaaattgaaagtcctcgaagttaataaccttagttttgcctattcaaaaacacatccggtctttcacaacgttaactttagtctcgaagctggagaagtatttactatccttggccctaacggtgtcggaaaatcaactcttctccactgtttagtcggacttttgacaccaaatgaaggaaccgtaatagttaacggaaaagagcttggaaatttgaagcacaaaacgcttgcacaacaagttgcctatgttcctcaggattatcatattaattccaatctcacagtacttgattatttattaactggtcgtgcaccttacctttcttttctccaaactccgcatcagaaagacgttcaacttgctgaaacctatttacaacgttttcatctttcaccttttcgtgatcacccctttatctcattaagcggtggtcaacagcaactaattacgattattcgagccctacttcaagaaccgcgcttgttaattctcgatgaacctatggctgcccttgatttaagtcgacagtacgaaatattaaaactaattcaagacttagcccagcaaaaaatcaccattattcttactactcaccttccagaccatgctttaatgctaccgactacaatcggtcttcttgattcaaaaggttccatggttactggatcatgtgaagagttaatgtcaactaaacagctagaaaggatctatcatgttccactaactcttacttatctacctgatcttcaacgatatacttgtcaaattaagctctaattaaaaacatccccttgctttggataattaatatccagtttaggggatgttttttatgctaattttcaccagctaaaatttgctttgcttgtttaactgttaaattgtagtggtagtatttttgataaaatttttgaacttcagagaccatgttaatattcttcatttcttggggatgaagagtcttagctgcccataagacttgaagtgcttcttctgcactataacgatcccatgggaaggtcccttgaggatttccgtatactttgttttcgcatacagccttcaattgacttagctgactgttagcacgtaacgcttttcgcgcttgggcagtagatgtactaccaacgataattacatctggattcgctttaatcaattcttcaggcgtaactgaaatttgatttccctttttagaaatagcattctttccacctgctagtttaatccattcgttaacaattgttttttgtccgtcaaccttggtaagatctgttgcattaacaatatgaagaaccgttggcgttgattttcggctcttcaaatgctgcttaacaagattaatgttgtttgttaattctttattgtattgccgagcaatctttggagaatttccccctaaaatttctgcagttaatgtaaccgacttctttaacccagcaaaatcagtatacattgcgttaactgttggtaattttgcttgacgggattcctttatttgagcttgatcggaagcaattacaacgtccggttttatttttactaattcttcaacttgaatttgattgcctgctaatggcgcagcaactttagcaatttttggatctaccattgtgaaccaatgttgtttcttaacaagaggagtagtggcaactagcttattttgtcctcctaataacagcacaacctgattattagcatgccataagtcagcaacgcggttaactttctttgggatctttattttctcccctgtcatatccgttatggttcttgttgaactagccatcgccgaactgctaataatactactaaacagtaaaaagattgctaaaagcttcaataattttttcattatagtctcctctattttatttatatttaattataggcgagttaaatacaaataaaataagggtttttatctaattccctaatattttcttactctttttcgtattaaaatcaaagaaaatggaggaatattttatgaagcgaaatcttaaatcagcagtatataaacacctaaactttgctaatgattttcaaaatttctttgattttccggattttcgtgaaatgagaccaatcatccgtgaagcagttcagcagcttgctaaagatagcttttcgcaaccagtcttgcctgttaaaattgagcatcaggcccttgcaattgagcaacaattggaacgggaaactagaaaatatcagcaacaaaacggtttctaccctaatcagcagtctgaactccataatttaatccggctctacacaaacctcttacaaaagattagtaaacgtgaaataattgatcaagagattgaagatgttatttatgccgccaaccaaactcgtgaaagtctccgtaaactaaaaaagcttgaaggttccggagatttatatgaggatagtcaagataaggaacttgtgccaggaaccttttatgatattgtaacgcgacagctaatccgaccttacttgttaaatccacagggaaagatgattccgaaaaacgttaattacgagggacgccaattagtaatccaaatgattacttattgctatcgtgactgggattcttatcttacccaccaatacgatgagcaatacaacattaaaaatgaacgtggcctgacaagcagggagtattacgataaattagaggaaaacgaactgaaatatgctgaccatgcctatgctgaggtgattgcagatacgtttaacgaatttaagaaaattcttgtccccaaatatcttgccgctcttgatattatgtcaactaacattgagaaaatcctcatccaatatcctcgtctccgcctgcagttcaatcaggtaatcgcaaacaatttcaagcttgatgcccatgggaaaatgcacgtgatggacgccccgctccaagatataagaaataagtataactactaccgtgaaaactttagttaggagattttagatgatatgaagcccaaaattacaccggaaatgaaattagggatgagagagtttgaaaataccatgtttatgctcaaagcaatcccttgtgaagaaaatatcaaccgttttgcgcttcaaggtaacctcaacccagaacgattagataacattgcctggttcttaccggcatatctttcagccgatttcaacctcttctttatttttgctccaaacgtcaataatcgttgggcaattagttgctcacaagttcatattgagaatgataaccaaattacagcaatgagcgaaactgttccaactggtcttggtttgaatgcagtaaacgaattaagtcctagttccgcaattgaattggtagcttatctaaaaacactcgaagtaaatggattaggttattttgacgaagaagttggcaaagaagaagatgtacgttttcaataaacaatatatgatcgataattattagagagccgattttttatatacttattattaaaagacacccttcacatttgtgtgaggggtgtcatcatctatttgttactaagccgacaattatgttcacaaagcaatattaatctctaaacatatatacaactctctatattcgaacttttattaaaaaaccacccataaattcaaatcatatgatgattcgaatctctaataacgagctttattataaataatcaaataaaacaagtattcacgaagtaatttttgatggagtaccttcaaatccattaaaaaacttccctaatgaaatttagacctctttttatcaactataaataaaaatcaatttagaatgtaactttaccgaaagtaattttgttaatgtagcgctattaatcataaactactttatattaaaactaacaattattttatacgcatattacaagttatttagtacggtcgaaggagtatatgaactgtattcaaatactctaaatttatttttggggtaaacgtattatcatttaagaatggagttaacattttaactaattggttattttatagcattctctaagaatatatgatgtcaaaaaagcctatatcaattcattttacccgtaggttttctaataacgcggtttattacattttacaattatcattcccattttgccaattatctttattaatattcataaagaataatttgcggtatactaaatttattgcattaggggtgcccatagtgctgggctgagatatgcagtgatgcatggactctagaacctgtaagttaacgcttgcgtaggaaaatgcaccggactttaatactcaaagtaggtgtatctcctaccttgagtattttttatttaaggagctaattttatggtacaacgtcaaattaactggtcactgatcgatcgagttcgtactaaaaacccgattgtccttaatctcgccaatttagtaacaattgataaagttgccgatgccgttagtgctgtcggcgcgtcgccaatcatgtctgttgagcccactgaagcagatgagatggtggcactagccaatgctctttctatcaatctcggaacaatcaatgagcatcaggcgacacaaattaggacggttttgcgagctgccacgccactcaaacccctcgttttagatccggtagcggtaagtgcgattccatctcgcttagagtttgcccactcattgctaaatgattttcattttgatgttattcgtggtaacgccagtgaaattgctgctttagtagaagctgacaatactagtcatggaatcgacgctggtaaagttcctaatcaggttcaaattgccaaaacgtgtgctcgacgttaccattcaattgtagtcttgactagtgaaactgacataataactgatgggcaagtcatctatgaaaatcccttttctgccgagatgttaacgatgaatgtgggtagtggcgacatgctttctagtatcatcgctgcatttctagggatcacttctaatacttgggatgcttgtattgttgcaacggttttggtatctgctgctggagtattagctaaccgttattcagtcggactcggttcgtggcaagtacagttttttgaccagctttcgattatggatacgaaagcattactagaattctttgaggaaagtgaggaagattaccttgattaatgattatccccaggctttaacaattgctggaactgatagtggcggtggtgccggtattccagcggatgtaaagacgatgcaaatgcgcggagtatactcagcaatggtagttgtcgcagtcactgcgcaaaatacattaggagtgcaagatgccctgccaatgcctgaaaaattaattaatgagcaatttgcttcaatcgctggtgatttgaaaattagggcttgtaaaacggggatgttggctgaccctctccgtgtaagaacggttgtacgaaatttaaagaaatatgatttaggaccgcttattgtcgatccggtcatggtagcaaaggggggcgcaaagttacttagtgatgatgcaatttcaattgtaagagatgaacttatccccctcgcctctctgattacgccaaacattccagaagcttgtgagttgacgggaatcacaataagggataaaaatgatattaaaaaggctgcccgcgaattacaaaagcgtggagcaaaaaatattctcataaaaggtggccatgcagaatcttcagacaaagctgatgattatattttatttgaagatggcaatgatatgtggttaactgcgcctcgtgttaatactaaaaatactcatgggactggtgatacaatttctgcatgtattactgcggaaattgctaagggtcactccatggaacaggcaattatgattgggaagacatatgtcgaaaagacgattagcaagggtattaatgttggtcatggtcatgggccacttaatcactgggttaaaattgaaggagacgatctaaaatgatgtttgatccaaaaatgttacaagtatacttagttggtggaacacaagatgtccataatgacgttgttaaatttcttgaaaaagtagagctagcaatgaagagtggtatcactgccttccaatatcgagaaaagggaaactcgaagttacggcctaatgaacgagtagacttaggactagaactacggaccttatgtacgcgctatggaattccattgattgttgatgacgattatgaattggctcagcaaataaacgctgatggagttcacgttggacaaaatgatactaaaattgaacaagtatctgtcgctgtaggtcatcagatgttcatcggctattcctgtaatacaccagaacaagttgaacgtgctaatacaatggactttgttgattatattggttgtggtcccgttttccctacaaaatcaaagcctgacgctgatgctgctattggtatcaatcgtcttgaacgtttaaacatgattagcgaacgtcctgtagttgcaattgggggcatcgatgaagaaaatatgaaagttgttcatgacactggcgttgcagggctagctgttatttccttagtctttgatagcaaggatcttgcagcaactgtaaagaaaatgaagaatttgtataaatcgagtaggagataattgattagttcaattatcgacctctcacaccaccgtacgtacggttccgtatacggcggttcgacaacttaatcacattgaattgactggagcgtcttggacatattcataagtccgagttgttccagttttctattagttagagaatagctcaaggtcttactgtgtgcagttcgccagtagcccttgcgggtactagcgaagacatatgcatcacgctgggacagccccagcttctgtaagttagttaccttagttttaagcttcttccattgcttccagatatactgtcttattcgggccctcaaccacttgtcaaggcgttgaataaagtcagttagtttcccaattgagtagtactgaagccatccacgcatttttcgatgaatttcttcaaacattcttgtcagggatattccacgattacgtttagttaataacctcaatgctttctttactcgttgttgcgattgttttgctggacgggcgtaggctccattgtggtctacacccaacgaaaagccaagaaactttaaccgtagcgggctaccgactttggttttatctgggttcactttaactttcaatcgcttttcaagaaactgggtaatgcttcgcattactcgttctccggctcgttgacttttaacataaatgttacaatcatccgcatagcgcacaaagtggtgaccacgtctagtcaactctttatccaactcatttagatagatattcgccagtattggtgacaatggccctccttgtggggttcctttttcactcttagcgaaaagcccatggtctaagactccgctagttagaaacttacgaatgagccttagtgtccatgggtcatcaatatattgttgaagatacttaatcatcaagtcatgattaacattatcaaaataggcttttaggtctaagtcgacaactcttcgataaccttgattataaagatctactacttttgcaatagcgtcgtgagccccacggtgagggcggaagccaaaactattatcagagaaaacacgctcaaagataggtgtaagaatttgggccacagcttgttgaaccattcggtccaccactgttggtattccgagttttcttactccaccattaggcttcggaatttctacccgtttgactggtgctggtttatacttgccctcacgcaaactagcgatcaattccgtcttattttctctgagatatggcagaaggtcattgactgtcatatcgtcaatgcctgctgcccctttatttctcttaactcgcaaataagcctgattaaggttattgcggtccaagactaagtcttggatagtgacactcatacctttaccttcaccataatcggtactacgcgcccttgtgtactttcggttttccaaacctatcctcgacaagcggtcagcttgttgttctgttttctgcgattgtcgcacctgattacacctccgatataagttacaagttattgtcgttcagtccttcatctgattactcagactactatgacctcggctgacttctggcttactcaacgctacatcactgcaccgcttgtttctgtggaaattaaacttattcctcttgtcggaaacgtgtaggccagatctccccgggtaaggatattaactttcgtaccatgtcaccggtagctttactgaaagtaacttcgagtagtgttggactttaacttgtcatgcagtcttatccagttagttccagccttatagctacttcttgttcatcggtgcagtactttgccttagacttccttcagattccacctcgcagtggacacccttgtcctcagctcatggttccgactactacggcccatagcggactctcaccgcctagctaatacccatgccgggcgcacataaaaaatagcaaggttggaagaaatttcagccttgctattttattagagaatgtttttactaaaggttattttgtccttgcttttgcttcctgcatccattttgaaattccaattgaaattgcgactccaatccccaacggaagaaaagctgtaaagttaaggtgacaaacttcaaataacataaataatgccattaacggtgcctgctgtgacgctgctaaaaataatgaggccccaataactgcacactgcgttaaggtaacaaccgggaagaagtgcatataaggaataccgagaaatactccaataactgctccagcggcaatcgatggcgtcagtgttcctccatagcccccacatttgattgtaaataaggtaactattactttagcaactagaccaaacaagagcgctcctaggacctgagaattgacggtggtcgtattcatggctaattgagcaagtccccgcccgtttcccataatttgtggataaaaagctgcaattgctcctgccgagaacgataaaagtggtaattgccagaaaatatttttacctgttgcccgtttactagaagctgctttaactccttgtttaaaccaggttccggttactccaaggattaatcctagcacaattgctaatggaacagatagcaaagagaaatctcgactcccaacaatataatatggttcgaatccttttaaaatcgaaccaatcatcgttgcgattactgacatgattaagctaacggaaactgaacgggcattaatgcgccgatataaaatttctaaacagaaaacagttcctgtaataggtgcaatatagacccccgcgaatccagctccagcagcagcggcgattaataaacgtttatcctcatcattaaggtgcaaccaccgataagaattaagcattcgagaccattcctgagcgatagcagcccctgcttctcgtggggctaattcacgaccgatggaattcccagtccctacgaaaaagatctgggtaaccacgtgaataaatgtttttcttaacggcatctctttaccattcagggcattcttaatactaaccgggtgataatgacgttgaagaaagtaccaaataattgtagcaattatcccccctattagcactgagacaaatcgatgaagaggaaaaatattaatattaactggaatcttatttgtctcgttaaagtttaaaaaatagtgctctgttaaatctagaatagcgctaaggatcaatgagctaaaaccaacgactattccaagaacaaccgttgcaacagctaatggagtgttctcttgcgtttctttcatcttctcgtctcctcgtattatataaatcagtccttacggattttgatactttactacttgctttctggtcactgcatgataacctctaatcatcattggcgttggtcaactggtataggttatcgtctcctgtagttttaactacttaattagtctgccgcccaggcaatcagctaatttacgaactcacatgctgtatcgattagtgaatcaactaattctgagtaggattaggtgcagctttgattcgctaaccaatgaaatactgatacttgcgaggatgtctttagcgattgtaattaggggttatcatgcagtgatcagattaagaccagtaaattttaatgaaaggaggccattccaatgaaactatttgtcggtattgacgttagctcaaaagatcttgtgacttcaatgatttccgaagaaaaccacgaagttgttttccgaggtaactttgtcaatgatttgaaaggcgcaactgaattaaagaaacagattattaacacggcgaattcaaatcaaattgaccaagttattatcggaatggaagctactttcatttatagttttcacccagcaatgttctttcaagaagacattgatctgaaagcttttaatactcaatcagtcgtcgttgatcccaagaaaactaaacgttttcacgatgttttcgctgaagacaaaaatgatcaaattgatgcttattacattgcagattacttacgtgttggtcattattcgattggaattgttcgtcaagaaaattacattgctcttcagcgcttaacccgttctagatatgagattgttcaaagcctggttcgagctaaacaacactttattgaaaacttatactataagctcaataagcttgttatctctgatgaacttaatacttctatatttggttcaaccatgatgcagttattaactgaagatctgactactgatgacttactcaatatttcaatcaatgatttaaccgactatttggctgaacacggtcgaggtcgcttcgcagaccccgaagctttagcgaaaacgattcaaaaggctgtttggtcttcgtaccggctagataaagtcgtagctaattcggttgacgcggttctctctgtctatgctgaagagattaaggcatttcaaaagatgattaaggatctcgataaatcaattgagaaagtcgttaaagtaactgatgatgaacaaattctgcgctcaattcccggtatcggaccagtctatgcagctggtattttagctgaaattggtcaaatcgatcgatttgacaacgaagctaaattagctaaatatgctgggctttcctggagagaaaagcaatcgggaagttacactagcgataacacaccgttaaagaggactggtaatacctatcttcgttattacttggttgaagctgccaacctagttcgaacgcacgatccagtctttggcgagtattatcagcgtaaatacaaagaagtaaaacacactccttctaaacgagccctcgttcttaccgcacgtaaattaatcagggtgatttacttcctactcaaaaatcaccaaatttatcaagaaaagaggtaattggtataggaagataaaatgatttttgacgcttagttttaaaatcaccttggaaccaaggcttatttaagtacgccaaaaatctggtcaaagcaatcaagccagtggtaattccatcttgacttattaccacatgactataaaaataaatcaacttccagtgtatcacggatgaatgtaaaaagataacaacaatctctcactatgttgaatattatgtaaactaaaataagaccgaagaattagcactaaacttcttcctcggtcttatcttctatctcagattattgttggacatatgtttgtgtttggggattaaattcaaatgttaatttttgatcatttaattctacaaagatcttccggtaatttttatcataaccattatgagccatatctattgttactctattttgagaagccttgatttgataaaggttgtattcaccactttgataagcaaagtcaaggccgttatcttggtaatgagtatatgaggcatgttgtccatataagcggaaggtcattgtttcattaggttcatcactaatatgacttacttcagggccccatggaataatcgtattctttttaacgaatagtggtaacttatcaattggcgcttctactaaaattgaccgcttacctgcatattcaacaccgttccaaaagtcaatccactcccctgctggcaagtagactgctcgtgtattttggccttcttgaactactggagctactagtaattcatcgccaaccatatattcatcgttcattgtccgaacagtaggatcctgatcgtagtttaatactaacggacgcattattccgagcccattctttgtctccttgtaacaaagatcgtataagaatggaataaaacgatatcttaactttaaatacttccggtagattgagagcgttggttcaccgaatacccaaggttcttgttcacgggttcccattgaagcgtgattacgatagagaggactaaataaggctgcctcaatccaccgtgttagcatttcggccgtggcatctgcaccaaatccaccaatatcagttcccgcaaaggcaaagccactcattcctaaattacataattgaggaatcatcatttgtagatgaggccacaaactttggttatcacctgtccagacggttgaatacttttgcgttcccgcataagcagcccgagtaatgacataaggtcgtttatgactgtatttctttaatccattgtaagtagcctttgccatattatgtccataaacattatgcaatttcttatgggtagaaggggattttccgtcactaaagacaatattatcagggatttcaccttcaaacgatgctggttcgttcatatcgtcccaaattccagctgttccggtatcaacaaggtatttacaattatcagcccaccattgttgtacctcttctcggccaaagtcagggaaaacagcatcgccaggccaaaccttattaacataaacggtcccatcaggattcttaacaaagtatcctttcttaattccttctttataaattttatactttttatcttgcttaacaccggggtcaataatcggcattactctaaatccttggtctctcaactttgaaacaaatgcttgaggatcagtaaacttttctttgttccaagtaaatactcggtaaccatccatatagtcaatgtcaaagtggatcacgtcacaaggaagatcattttctcgtagtttagtcgcaatctcttgaactttttcaggacttacactatatccccaacgcgattgctgataaccaagtacccatttttgtggcaatggaacgcgcccagtaaggtaagtataatttttaacaatatcgctcaagtgcggaccaccgataatgtaataatcaaggttaccggcgactgcggaataaaagtagtaattagcattttcttttcctaaatcaagatggctccgataaggattatcaaagaaaagaccgtatgggtgaccgttcttcaagcctaacatgaaaggaatagatttataaagccgggtaaaactttctacttgaggtgctggattatcagtattccagttatcgtattcgtagccacgtttattcaagtacccagttttatcaccaagaccatatatctgttcatcagtggctaaagatttaattacttcaaaatatgtcttatcttggtcacttccaccagcaatatcatgaccttcggcagcaactaattttgcatgagccttatctaatccacggtcaatcggtgttcgcttaccctgataatcaataactaatggatgaccctccttgtcatatacattcattttctcgttgtcgtatatttttacaattaacgctgccgtagttaattcaagatggtcaccatgatctaagactgtaaaattagttttaattgttttattgccttcaatagcatatgatgttcctttttcaccgtgatcttgaaatactcgaatgatttcaggcgtaataactgataaaacaatagcactgttttgataattaatcgtaatcttttgatcaacaattgcatatccacataattggttattcattaaaatcgtccttcctcttttttacttttattgtatcgcatttattttaaatgtaaacgttttcgtggagagaggataactttttaagaataaatgggatataattaaatgtaataatgaatatgaatgaggcctataaataatgcataaaaaagcacaaatcggattcggacttttttgttggattttattcggagtattactctttaatgttttaactaaatctccatttgttcgtttaatcgatgcaggtggctttgatctgactgccccagtgtctaagtttaagactactatcctgaccgaattaacctttatgggtgacccagttacagtcggcattataacaatcggcttaatgctcctgttatggcgtcgcggaagagcaactgatagtgtttggtatggcatgttacaatttattggttactgtttagttatcctcatcaagtatagtgttactcgtctccgtccttcctttcggttaattgatgttagtggatatagtttcccaagtgggcataccttttcaactgctattttcatttttacgatcctagccctccttttaccctattgtaaagttaagtggcagagggtaatcttaggaatcgtcggcgctctatggatcattattattatgtattcgcgagtttatttacgagctcattttacttccgatgtgatcggggccttttcattagctagtggatggtggttattagctaatagtcagcgcgctattttctttcattggttacaaaaaccagtcaataaagtctaactatcaaaacactgagctgtaatcaatgagcaattatagcttagtgttttgctgttttattactatttctgggtcaactaagatggcctttatagtaagcagtcaataacagtacgtctagctctagctaccccggatcttctatactgagactatcatcagtaaggagattttttatttatgacagaacaaaatgaaattattaccccagttttcaaaaacaagccaagtaatttacaaaagcattcttttacggcacgccctgccgtaaaaattaatgtgaatgaagtcgaattaacgattttcaaggggactaattctgttttagcttcggatatcgttaaaatggttattcgttatgctcgttaattggcatgacccagattatatctatctagtctgtggaaaaacagacatgcgaaaaggtattgatgggctcgcaatggtaatcgctgagaactatggattagaatttaattcgcttttcttattttgcggcggacgtaatgatcgctttaaaggattgttttgggatggcgagggctttattatgctctataaacggtttgaaaatggccaccttagttggccgagaaacagtaatgaagccaaagaattatctgctcaacagctcgactggttattgcaaggactgaacccattaccaattcgtaaaattcaagctgttcgaccaggaagtttttattgagttacctctatttaaaagaagaattctttgatataattaccaaagaataattcaaaggaggtgacgtaccatgaagcaaacagcggaagaacaaatcaaagaacttaaacaacaattagctatggccaatgaaaagattgctcaattaacagctattatcaaacttcaaaagaaccaaatatttgggaaaaaaactgaagtaatggagcccgtcgttgatggacaacaatccttatttagtgagcaagaaatggatcaacttcaagatcctgatatttcagtcacggaagtgactgaaaaaaaataaagcaagtggtgcgtcaccggaaagcaaaacgatctggtcagcggaccacttttttagatggtttaccacaggttgaagaagttattccattaaaagatactaactgcccacactgtcatcaactaatgaaaaaagtgggtcaacatgtatatagtagagaagcacggttaaaaccagctgaattatattgtgtgaatttgattcaagaaacttataaatgtaatgagtgtattaattctaatggtagcgatgtacttgtcagtagtaagatgccacagagtcttttaccccatagttacttttcgagtactattttagctaaagtagcagagttgaagtttaatcttgctttaccgtttcatcgtcaaattaagttttggcaagccgtcggcttacgagttgatgctcgattattggcgactaacatcattaaggttagtcaaacctaccttgaactgttatatgattatttacaggaattaatcagaaaagaatcggtaattcatatggatgaaactccattcaaggtaattgatgagcctaatgaaactggctacttttgggtaacgcgatcaacaaaagaattcagtaagcatcaaattatcatgtttcattactataatacccgcgcgggtaaaaccattggtcaaattatcggtcatcaatatcgtggaattattacgtgtgacggttatggtggatatagtgatcgattatatccccaggcaaaatttgggtcatgtttagttcatattcgacgtgaattttatcacattacatgtttattgaataaggagcaattgaagaactccaaagcataccgagttttacagctaatgcgaccgatctttcatgaagagaaacaattaacatattccaatcataaggaaaaactagtgcaacgtcggttgcacgtgaagcctttgatggataagttatatacttatttagaaaatatcagttttcctcaaggacggttgaaagctgccattaataatgctttgaagctaagaaagcgagtatatcaaatatttgaagatggtcgagtgccgttaacgaataatccggttgaacaagcgattcgtccatcaactcttattcgaaagaatagcttatttgcgaaaagctctgctggagctcaggcaaatgccattttctatactttggtggcaactgcaaaccagaaccatttaaatatctacaaatactttaagtatctttttgatcacttaccaaaccgcaaggacgcaggacttgaggcttatttgccatggtcaaaagaaattcaagcagaatgccataaataaaacgggatcatgaattatcattttcggtagctcatgatcccaattttttcaatccgtactgttattgactgcttgcccttagacttctttcagattccacctcacggtggacacccttgtcctcagctcatggttccgactactacggcccatagcggactttcaccacctagctaatacccatgccgggcgcactaaaaaaaggacatgcaccgttaaaacgatacacacccttttactactgcgcggcaacgtcctatccttgcagggagcgatcccccaactactttcggcgtgttgaagcttaacttctgtgttcggcatgggtacaggtgtatccttcaagccatcatcaccacactctttgtcccttcggacgagagcttgtgctctcaaaactaaatcctatctattctcttccaataaaccttaccgctccttggttaagtcctcgaccgattagtaatggtccgctccatgcctcacggcacttccacttccatcctatctacctcatcatctctgaggggtcttactttcccgaaggaaatgggaaatctcatctcgaggcgagtttcacacttagatgctttcagcgtttatctcgtccatacatagctacccagcggtgctcctggcggaacaactggtacaccagcggtatgtccatcccggtcctctcgtactaaggacaggtcctctcaaatttcctacgcccgcgacggatagggaccgaactgtctcacgacgttctgaacccagctcgcgtaccgctttaatgggcgaacagcccaacccttgggaccgactacagccccaggatgcgatgagccgacatcgaggtgccaaacctccccgtcgatgtggactcttgggggagataagcctgttatccccagggtagcttttatccgttgagcgatggcccttccacacggaaccaccggatcactaagcccgactttcgtccctgctcgacctgtctgtctcgcagtcaagctcgcttgtgcctttacactctgcgcatgatttccaaccatactgagcgaacctttgggcgcctccgttaccttttaggaggcgaccgccccagtcaaactgcccacctgacactgtctcccagcacgttcagtgctgcgggttagagtggtcatattgcaagggtagtatcccaccagcgcctctgtcgaaactagcgtcccgacttctacggctcctacctatcctgtacaagcagtacaaacactcaatatcaagctacagtaaagctccatggggtctttccgtcctgtcgcgggtaccctgcatcttcacagggatttcaatttcaccgagtctctcgttgagacagcgcccagatcgttacgcctttcgtgcgggtcggaacttacccgacaaggaatttcgctaccttaggaccgttatagttacggccgccgtttactggggcttcaattctgagcttcgccgaagctaacccatccttttaaccttccagcaccgggcaggcgtcagcccctatacttcatcttacgattttgcagaaacctgtgtttttgataaacagtcgcctgggcctattcactgcggctggccttgcggccagcaccccttctcccgaagttacggggtcattttgccgagttccttaacgagagttctctcgctcaccttaggattctctcctcgactacctgtgtcggtttgcggtacgggcagttaactactccttagaagcttttctcggcagtgtgacatcggcaacttcgctactttaatttcgctccccatcacagcttgtcaacacggatgtaaacatttgactcacatcctgacttactgcttggccgtactcttccagtcgtacggtttgcttagcctcctgcgtccctccatcgtcaaacgcagttaactggtacaggaatctcaacctgttatccatcgcctacgcctctcggcctcggcttaggtcccgacttaccctgggaggacgagccttccccaggaaaccttagtcattcggtggacaggattctcacctgtctttcgctactcataccggcattctcacttctaagcgctccaccagtcctcacggtctgacttcgccgcccttagaacgctctcctatcacgtgcacatagtgcacatccacagtttcggtaatatgcttagccccggtacattttcggcgcaggatcactcgactagtgagctattacgcactctttaaatggtggctgcttctaagccaacatcctagttgtctatgcaactccacatccttttccacttagcatatatttagggaccttaactggtgatctgggctgttcccctttcgacagtggatcttatcactcatcgtctgactcctgagtataaatcaatggcattcggagtttatctgaagttggtaacccatgacgggccccttgtccaaacagtagctctacctccacgattctttacctcaaggctccccctaaagagatttcggagagaaccagctatctccaagttcgtttggaatttcaccgctacccacacctcatcccagccattttcaactgacacgggttcggtcctccagtgcgctttaccgcaccttcaacctggacatgggtaggtcacctggtttcgggtctacaactacatactccttacgcccatttaagactcgctttcgctacggctccggtttttccaccttaaccttgcatgcaatcgtaactcgccggttcattctgcaagaggcacgccgtcacccattaacgggctccgacagcttgtaggcacatggtttcaggaactatttcactccccttccggggtgcttttcacctttccctcacggtactggttcactatcggtcactagggagtatttagccttgcgagatggtcctcgcgggttccgacggggtttcacgtgtcccgccgtactcaggatcctgaacagagagtgtgacgtttcgtctacggggctttcaccctctatggcacagcttcccaactgttgcgactacgtcgcactttggtaactctaatgttcagtcctacaaccccaacaagcaagcttgttggtttgggctcttcccttttcgctcgccgctactcagggaatcgatgtttctttctcttcctgcagctactaagatgtttcagttcgctgcgtctacctcttgctagctatgtattcactagtcaagtaatcagcgactaagctgattgggttgccccattcggaaatctccggatcaaagcgtacttaccgctccccgaagcatatcggtgttagtcccgtccttcatcggctcctagtaccaaggcattcaccatgcgcccttcataacttaacctaaacaatcaaagattgtctgattaattgagttagcgattataattcgttaattaaaactcaaataacgcggtgttctcggtttattgttttgttaataaagaaattagatagtatttagttttcaaagtacaagctctgagggtaaacccctcaaaactaaacaaagtttcttcgatgtgtaggttccgttttattccttagaaaggaggtgatccagccgcaggttctcctacggctaccttgttacgacttcaccccagtcatctgtcccgccttaggcggctccctccataaaggttaggccaccgactttgggcgttacaaactcccatggtgtgacgggcggtgtgtacaaggcccgggaacgtattcaccgcggcatgctgatccgcgattactagcgattccgacttcgtgtaggcgagttgcagcctacagtccgaactgagaacggctttaagagattagcttactctcgcgagcttgcgactcgttgtaccgtccattgtagcacgtgtgtagcccaggtcataaggggcatgatgatctgacgtcgtccccaccttcctccggtttgtcaccggcagtctcactagagtgcccaacttaatgctggcaactagtaacaagggttgcgctcgttgcgggacttaacccaacatctcacgacacgagctgacgacgaccatgcaccacctgtcattgcgtccccgaagggaacgccttatctctaaggttagcgcaagatgtcaagacctggtaaggttcttcgcgtagcttcgaattaaaccacatgctccaccgcttgtgcgggcccccgtcaattcctttgagtttcaaccttgcggtcgtactccccaggcggagtgcttaatgcgttagctccggcactgaagggcggaaaccctccaacacctagcactcatcgtttacggcatggactaccagggtatctaatcctgttcgctacccatgctttcgagcctcagcgtcagttgcagaccagacagccgccttcgccactggtgttcttccatatatctacgcattccaccgctacacatggagttccactgtcctcttctgcactcaagtcgcccggtttccgatgcacttcttcggttaagccgaaggctttcacatcagacctaagcaaccgcctgcgctcgctttacgcccaataaatccggataacgcttgccacctacgtattaccgcggctgctggcacgtagttagccgtgactttctggttggataccgtcactgcgtgaacagttactctcacgcacgttcttctccaacaacagagctttacgagccgaaacccttcttcactcacgcggtgttgctccatcaggcttgcgcccattgtggaagattccctactgctgcctcccgtaggagtatggaccgtgtctcagttccattgtggccgatcagtctctcaactcggctatgcatcatcgccttggtaagccgttaccttaccaactagctaatgcaccgcaggtccatcccagagtgatagccaaagccatctttcaaacaaaagccatgtggcttttgttgttatgcggtattagcatctgtttccaaatgttatcccccgctccggggcaggttacctacgtgttactcacccgtccgccactcactggtaatccatcgtcaatcaggtgcaagcaccatcaatcagttgggccagtgcgtacgacttgcatgtattaggcacaccgccggcgttcatcctgagccaggatcaaactctcatataaaatatataagaacttgaatagctctaaattatctttgttattaagcgaattgacttcgcaaatgttttgcttcaaatcacatcgtgattgaagaccctacacatttgattcgtcgaaactttgttcagttttcaaaggtctacctgttggctaattaagtagccacccaacacagcaattataacatatatcggattggcttgtcaagaataaattttaatcaatttcgaattcctttagatctataactcaatcagcaactttattaatatatcatgttgtcgatgggatgtcaataatatttttaaattattgttgagactttgcaactaagttaaataaatctaagaagttacaagcgattatctatctcccatcgctgacagggattttattatatcctatctctaaatcctttacaagcatttattttattttttatgcatatcattcaaaaattgttgaaggtttaactcttcattaactttttggaatgtttcggtattccagccattactacctgtaacaactaatttattattatcaagcgttgcggtaaggggattagttacgtcacgatcttccaaatttataaggtagtgttctccttctttacgccatgttaagctatcatctgtatccggattattcttatctgcataaacatactgacctgttccattttcatttaaggcaatagctgcaccgtcttgatcatctcgatacgatccaacaatctttgcagtctttgttattttaggcgaatctttttttactactttattgtcacgaactgggttaagttgcttactagcaaaccgtttataatttacccctaaaattcctaacaagattaccagtaatatagtaaatataattaacccaatatgtgatcgtttctttttagtacttttcaccatcatcaccccatccctcctagtattatctcatcatttcagtaaatctgtcacatcttttttagctgatcttttcttcaagttgaataaattctcgaaggtatttaaatggaaaaggaattactgttaattgatgaaatcgtacaaaattcaccatcatcagttgaagaaacttcaagatattttcggtctcaatcgtagcgaaaccacgctcatttaatttaatgttaggctgaagttgccagatgtgtgatgcctttgcaattgatatattcatatttttactaatggttcctacattatagtaaataacatcctgatcgccgttatcaacgaaataattaatatcggttaatccagagagatgcttttgaacatgggattttatttttggtttcactttcaaaactagtccatattgttcatataattcatccaataacaaattaattgcaattggacttagtattttatttttcttaataaaattaaattcatcttttaagtcattgatgttaaatgaatttagctctcttttattaatgatagaaataagattttggtatttagttctgtaattagggtaacttttacttaaatcattcaaagcccgtttaagttccgcttttgttactgatgaacaattttgatgactaatcatctcgttgatatcgccaaaaagctcagcattaggcaaagtaaagatatttttcctgtttaaattgtagaaagtattggcaggagttttaattaggtactgaagatctgtatcatcagaattaataaattttgagctttcttgtaaatctaaccgtctcacctcgaactcatcactattaatcattttaaatagatagactgcttgggtaccataagcttcctttgcaacttgataaaactcccatcccactattgaatctagttaatgatacagacttaagcttctttctttcaaatctttctttattatcaactcttttaatgaattaattaacgtacttccaattgtcaaatgttgcactattgcctgctgatagtctctcgcataattatctttaacatcttcatgagtttggaaataccgcttattattaatcaccactagattatatccaaatttatcttcaacggtcggtctaatattgattttaactgttggtagaagctgaaccaacgcgatcttgatatcttctatcctttcatcccttgcgatccgattatcgattaagtttaactgattcgtcgcaaagaattcttcgatatgcttgtctaaccaatccccgccatgcttcatctcgattctgtcggttgggagttatgtagataatgacatcagattccttacttttcattagcatgtccgttacccactgcagggcacccgttgttttcccagagccaattcgattttcaaataatgctaaacccggaagctgcttttcagtaatttctccaaacagcttaaccgttaagttttccattggtactatctcccttccaaaaaaagactccctgatttctgatcaaagagtccccaaataataattcgataattgcaaaaaacatatgtgttgctgaaagataattcattttacttatttgctgctattttctttcctttatttacatagtgaagcgtaccaattgggccatcaacgtgaagtttgccattcttataaacaagcttggttactgccgcattctgcattggcttcccatcatattttttagaaatggttgaaagatattcattaattgacattcctgaactaacaactaaaacattgccaccaccctgtttttgagttgtttttgcaatgtgaagcaattctgaattcatccgtttttgcacctgagctgaactttctgcccgatcatttttagccaacttggtattttgtgaattgtccatatcaagtttgtggtaggcatcttggagcttattccagtaatctttgcccgttgcttgctggaactgcttgccatcttgataaccataaacattagcaatcttctggttatcagcttcaatactatctccttcaaagctaccgtatccgccttcacgtaacattggtgtggtcgtaatctttgtatttggattggcagaatacttcaatgcttgttgcgcagtaacttcttgacgtgttaagttacccgtgtaagcatgcttaaatttaatcccctttaatccatagcccaaatcattagcaacggtaattccatttttggttaatggaaaatcactcgatccttgtacccgttgcattacattaccagtagtttccccgtgacgtgtaagatagattgtcacctgcttatcattagaggctgcataggtagtagctggaaccaccgtcatcgccgagctccctaatagtaaacctgataaaacagcacacattactgttaattttttaaatttcattaaactttccccaattcttatcagattgtttcagcaacacccttattttacatatttttgtaagcgcattcaataatatttttgtcaaatctaaagaataagcattacattagcaattgctcttttctttttccttaaaagaattacaatagtcgtgaggtgatgaggatgaaaattcttgtaacgaaaaataaagaagtagcaagccaaaatgcctttgaatttctccaaacagatattattaacggtgcccaagtacttggccttgcaacagggagttctccactaggcctttatcaaaaaatgactaatagttctgttgattattctaaccttatttcgattaatcttgatgaatatgtcggtcttaaatcaactgatccgcaaagttatcattactttatgaaatatcatcttttcgctcaaaagccatttgccaaaagttttattccggatggcagtaatctgaatgccactgaagtaattaatcactataatcagattttggctacttaccctattgatacgcaaattttaggaattggtaataatggtcatatcggttttaatgagcctggaaccccttttgatagccaaacccataaagtaaagttaacccctgctactatcaatgccaacgcgcgtttctttacttcaagcaaggatgtaccaacagaagcctacacgatgggaatcggttcaatcttgcaagcaaaacatatcatcttactcgcttttggtgagcaaaaagcagacgcaatcaacaaaatggtcaacggtaaaatcacgactgctgttccggcatcagccctccaacagcatccaaacgtaacagtgattcttgataaacaagcagctagtaaactaaattaaccagcacttttttgtaatgccatggtcttggcaataataccgacatctgattggtttaacccggcaatcatttccgcgttgtctgctgggtaatcaattacctggccatgatggagggcaattaactggataaataatttagttgaccgcccatttccttcacgaaacggatgaatatagttcaaatcatttaagagagcagcataatcctcaatggtaggctgctttttcttattcaatcgcccaatttcatcattaatatacttaattgcattatcaaagcgaccatattccaaaaaatcaaaacctgcttttgaaatgtagtagttacgtaactcacccgcccagtcataaagccaaccaaaaaggaatttattaattgtctgtaaatcttcaaagcttttaattttcggttgttgttgcaggagagccacttccctttctgccacaccacgatactcgattaaacttaattcatctgcatttttaattgcaaatttattgctaagcgttccattatcatataaaaattttgcttgaagttcttcatcagtcatcttcatcaccaaatagctgctcaatttccattaaaatttcatcatctggattttcggcactctcttttaattgtcttacctctgttgctgtaggtttccatccctctaaaacattactttcaacggcaaaacgaacttgttgataggaagaaggtgtttggaactgcacgtgctgaatcgttaattgatcatcgtcagtatggaggtaaaaatcaaagtcttgaatccgatctaataattctcctggacgctctcctaaagcatctgcaagtgcattaagaatctgaattgaccaagttgcaacgggccgtttaagtgtttcgttaacctgcgcaacgtcgaggccgctttcttgagcgacaaacgcgacggtcatattattggtttttaaaatattgatgatattttctgccatgttcttaccccatttttactttatcgtttccattatagcgagaaaataaaatagtgaaaaatagactgctaactcccaaataatgaaagtaacagtctattttaagtaattaagcatgtttgcgcttgcgatcaataattgtcaatccggttactgccattaatgagcttccgagaagaagtaatgcaagatcctcatcgttaccagtttgtggtaaagctgcttgctggtcagctactttttgtttttggccattgattgatgtaggcgtcaaattaattaattgattattagcagcagctacggtttgttgcttaggttgaccgtgtaatgtaacagtttcggctggttgaccagctgttgttggcaaggttactgttggagataccggttggcttggaacctcttgaagctgatttccttcagtctgggaattagcatcgttttgagtgttccgattagttcctgtttgtgactgtgaatctgagtcagcttttgctaattgttcagcagtcaagtaaatcttacggttcattgttagtgcggtaattggtttaccatcattagtcatatcagtaatataatcaataaacgcgtctgtatcttgaccaacaatcccgacaactttggtacccttaaatgcagaaaagccatctccgccacctgctaaaaagtcattaataacaacattgtaagtcttattcatatcaagcggttgattatgttggtcataaacttgaacgaccttatatggttggttaggatcgttttgatcagtataagtataacgaagcccggaaatttgtaagtaataagcttgatcttcgtcgtattgttgattcaaggcttcaacgatttgtgcccctgtcatttcaactacccgcaaaatattaccaaatggttgaaccgcttgggcactcccccatgtaatggaacgatcaggattaacatgcagatctgcacgaacgccgcctgtattagtcatcgcaaaatctgctagtaagcccaccttatgagcagcatataattgaccatcgacaactaattcaccaacggcattttcacgagtaggggtattatgtagtcgtccaagaatatcgcctgttgtagcagcttcccctattttcttattaataattggtgctactcgattgttagcatcttcaacaattgctgtaacatttgcatctgttttgatattaggcgcatccttttcagatagtaccggaaagacatgtgaaacgagactattgggcgcaaaatcattagttgttggatcgatgtaaccgataatatcatcgtaagctttacccgtgtaaatggcttgcactaattttacacttccaacagtagcattagcatattggtgggagtgaccggcaatataaaggtcgacagaattatcagggtcaatttggtaaagcctcttaataatatcaacagcattacccttagtgctgccatctttattagttgaaacccctatatgggcaagaactacaattgcgttaacaccttttttgcgtaaaatttgatcatattttgcaattgtttcagcctcatctaaaacatcataatctttgtaattatcgtataaggttaaaattggtagggaagtagtttcaatcccaataaagccgatccgggcaactttaccatcactagtatgaatttctttaatcaagtatggttgcattccaaacgggatctgaccatcagacttattcacaacattggcggtaataatattaatccctgttttcacatgaggataggccatctcagctttattatattgtttagtaggttcatcaccattaacaatccgcatatactcagctaagccttcatcgaactcatggtttcccaaagttcctatttcaaaatgcattgcgccttgttgaaagcgaatcatcttcagaaatatcatcgagcagcagtagtgaggaaagttcagcagttaatacaagcagcagttcaactgcgccatcgaataacggtgatatgcgaaccgatcaggccggtatgatcgttggtaatgctcgttcaaaaatctaccatacgtctgatcaacaaggctatcatatgaattcagcaaatgcggtttactttaactcagaagcagaagcgcaagccgctggatatcgtaaatcattaagataaataatttcaaagtcattattgccctccccacaataatgacttttttattataagaaaaagctaagaataatttcctagcttttgaaatgaaggccgatttgactgtggaagataatatggagttaaagagcattaaatgcattttttaggccttcacttaaatatatacggaaaaagataacatttgcactttttatttaaaaaataaagatctcctatctggtggttcgtaaaagagcagataagagatctttacattgagatttgtgggagaagaaagagagcgagacaggaatcacctgttacttcgttttttgactcaaacctagcctttggaggccacgcaaacatcaatagtcaccaacagctttgccaagcgatgatagaccattgttgtactgcgctgtcacctcattatgaaagcaacttgactcatatcacagctcccattagggaagtgattgcagacgaagacagcaaataatggggaaaggagtctatgaacgaacaagtcttcatctcgcaaatcacctcccctataaatatatatacgaaaaaaactaatttttgcactttttatttttaattttttatctaatttcatcatcgcaaatttaaatactgttttgaacttatatttcatgctggtatgcgacataactacggccatttcttgatcgaacaattaactgatctggaatttgctcctcaagttcagtgatatgactgataattccaatcatccggtggccttcgagttcttgaagggaatgaagagcatcttcaagagcttgctgatcaagggaaccaaatccttcatcgataaagagcgcatcaatcttaattcccccactttgctcttggacaatctggcagagagctaaagcaagagcaagtgaagccataaaactttcaccaccagaaagcgtccgggcacttcgcgttctaccagcattatcatcatatacattaacttcaagtccactccacttggcaccagccccatgactttctgttgctaattcaaactggtagcgaccattagttaaccggtctaactgaacattggctgctactaagacctcttgaaaatatgcctgtaatacataccgttctaagctaacatggttttcagtattaccagtcacaacatctgttaatgtttgtaattcattaatttcttgatcaagttttccggttttttcgactaccttaataaccttttgatccgtttcttctaattgcttatactgagcagttaactgacccatttcttgctgatattgccgaagttgttcacgctcagtattaagtttggtctgcgttgacgtaatatctggcatgggatgattattgatggccttagtcaaccgctcttgttgggactgattatcctggacttgattctcaaaggtcgttacctgttcacgtaatgatgacaatgttgctacttgttcactagcttcttgccagaaattccatttaagttggacatcatattgggctaaaaggttcacaagatattggtgtaagttatcctgttgcgtcgtttgggtggcaagttcttctttagtctggtcgatccgactatttgtccctgctaatttttcggcattttcttgtcgttgttgttgcaataattcaagctggttattaaaggctttgatcgttagttgatcagtttgaatttgcttgtcagcagcttctttagtaggaaattttgctggtaaagcggctgttttttctttcagaatagtctgcttagcgattaaatcctgtttgcagcggttcacactttcgtctattttatctaattcttcttgagagaacttggattcttgttccaattcttcctcttctcggtgccattctttaacctgttgttctattctatcgaggtcagtcttcatttctgctagtttttgagcgtgattttcaatttgtccttcccaatcactcggtaattcattatcccctaatagttcggctaaatttacctgcttggtttctacccgtgttgttaagttagcaatttgggaaacgctttggcgaacttgctcttttaactggtcaaacgtactacgattttgttgaactttaacggttgctgctttaacttgtgcttccgttaccaattcaccatcatctgctaaattcgctggatggggatgatcaagcgatccacaaattggacaaggggtggctggctttaatttttgagcaagaatggcaatttggtgacgggcaaagcgatcattcaagtcatccaactcaccttgcgatttttgaacgagtttttcagcatccccctgcttttgctctaatttcgcgcaatttttcttttcagataaaagttttgtttctaattgctttaaatcttttccagcagtcgttaatttttcctgaaggccttcttgttttgctatgtgaacttgaacctcacccaagttttcatgctcttttaaattattagtaacaaccgtcaattgctgttgagcgtcttgcaacttcttctgggaagcagcttgctgtttttcctgctgctttaagtgtgtttgtagttcatcgacagctgattttagcttatctcgatcatcgaagaatgggagtttattcgtcaagtcggcgacctcagtttgaagctgatcaatttcttcttgctgcttactcgtttgttgtaggtcggtttcaattgtttgctgttgcttttgaaggttgcgcaggtcctcatggagaaatttattgtctaacgttaatttttggagacgtttttcgccatctttccaccgttgatattctgtctggtgttcttggtaccattcaaggacttttacttgctgctttgtttcttggatctctcccgcttgagcttgcagtgtttttccagccttgataagttcagctaactcctcaatattcttcttcaactcttgctcagtatgaagttgggcatcaagctgatcaactttcttttgctgttgctgctcatcatcgcccaagtgttcaagattagcttttagtcgggataagtaatttttttcttccgctaaccattctttagttgttaattgcgcatcaatcgcggttactgtttcctttaatgattgaagttttgtttcttgggtcgtcaatgacttcttctgttcacgcaaatcattttttagttgcgttgcccactgctcataacgggacgtattaaaaaggtcacgcaaaagagcttccttcgtattgctatctgaatcgagaaactgccgaaactttccttgagggagaagaacaatctgcttaaattgatcacgggttaggttgagcaggtcagtaataaacgtgtctgcttccttaattttagtaatttcatggggatgatcgctttcaagcgggtaaataagatcgacggcttgattatgttcaactaaattgccgcggcgtccctttaaaacctgtttaggacgacgcataatttgatatttaaggtcttggtgttcaaaggtaaactttaccattgtttcttggtcagctggtgcgaaatcagaacgtaaagcagcagccgaccgatcacgatcattggttgtttgaccaaaaagtgcataacacattgcatcaaaaattgtggttttccccgcaccagtatttcctgctaccagaaataaggaatgctctatgaactgcataaagtcaatcacttgatgctcatacggcccaaagtagtgtagttcaatcgttaatggacgcatcctattcctcccctttcatgatttgagtcaaggccttttctgcccacttcttttggcggtcagttaaaccatttcccatcgtttgggaataaaaatccgcaagtaaatcaaggggtgattcctgagcacgctttttactaaggttgagttgaacctgcttggcctgatgtgtccggtgaaggctgacaatcttcggataatattcgcgtaacttgtttagtacatcggggattcgttcttggtcggtcaattcaatgtcataaaaatcttcccgtaatgcttcttcaggttttgtagccagttcagtaaaactccctttcaaaaggtgaatatcatgagctggcgatagtggaacccattcggccttaaaaggtgctgtatcaacaatccaaacgcctttttcttgcttggcttccgatactgaaaacttcattggtgagccactatacttaattttttcgtcatttaaagcattgcggttatgaaggtggccaagagcaacataatcaaagggagctaaaacatctgtcgtaactgcactcaatccaccaacctcaatcaaagtttcagaatcagccgttcgcttacttccagccgcaaagaaatgggcgacaaggacatgccttttaccaggggcaaaatgcttttccatctcagctgtaattcgtgccatcgcatcattgacatttttaatcttgtcgtcattaaaatagttgcgaacttcttgaatcccaaagaatggcaataagaaaaactgggtatccttgattgtgaccggggtaaaagcatcattaatgttagtatttaagaaaaatgactggtaagcaaaccaatcagtccccgtactcaaacggaccgctgagtcatggttcccactgattgccagtaaaggaaaatgatcagtcaaatttaattcttgcagcatctggtttaaaagtccaaccgctgcttcattgggcacggaccgatcatataaatccccggcaatcactatcgcatcaacttgctggtctttggcaattgcttcaatctgcttaaaggttgctagctgatcatcaagcaagctaaaatcgtttaatgtcttgccaatatgccaatcagccgtatgtaaaaaacgcataagttcctcctaaaaatagtgtctctaatattatatatacgcaaaaaatcgttaaatccacttaaaatcttacattttacagaagggagcgagacagaagtcacttgtgacttcgttttcgagcccccgcaagcaacaataggccttcagcattcgactttgccggacgctgaaggccattgttgtactgcgctatttatcttttacaaaagtaacttgatttatgtcacagtctctgaactaatcttagttttttaaaataacccaaataatttcttacgttgctgaaccttcttaatctgatggcgaccaatttcatccccattaatgatagctcgcgcattatcttggtattcttgggcaacgtcagcgccaaattcacgcgataatttgtcaaaggcttgtcgcatttcatattttcgtcctggaaggtcatgagcatcagaagcaaagatatatccttgaccagccgcaatcaggttcttactgaatttttcgacttttttaccaaatgtaccaacataggaactagcagtgatttgtgataggcaccctttttccaacatttgataaagcaagtccggttcagccatgatcttggtattccgttcagggtgaacaaccactggcgtaatcccccgttgttgaaggttaaaaatcatctgattagtgtaatgagggacatcattgtctggaaattccaacatcatatactttccactctcatcagcaaatagaatatcatcattatcaagagcttcaattagctgaccattaattcgcacttcttgtccaggaaagacagttagtggaatattatttttctccagttcttcctgaaattcttttgttcgcgctaaaacatcttgtttatggtttacatagtgtccgttcatatggtgaggggtcaaaagtgcatgggtaaccccgttttctgttgcttcttttgcaagtcgcaatgaaatctccatactttttgaaccatcatcaatccccggcaaaaggtgacaatgcaaatcaaccattaccattcttctcatcccttttttcacatattaatattttaagtatagcaagttatagcgggattttatagggacttaggacaaaacttcacaaaacctatattatttgaggatgttaaggagtgtctccttgttgatgacggcatttgctagctcatttcctgaaagaatagaattagcaagagctgcttttttctgttgcatttcaatgattttctcttcaattgtgttttgtgcaatcattttataaatcgtcacgttattcttttgaccaatccggtgagctcggtcagtcgcctgattttcagccgcaatattccaccacgggtcaaaatgaatgacaacatcagcactcgtaagatttaaccccgttcctcctgctttcagagaaattaagaagacggctggctgatcataggaattaaattcatcaacaaattgtaaacgatctgctttctttgtctttccttcaatcacaaagtacttaattcctgctttagcaagtttttcttttaagattgctaatgccgatgtgaactgcgagaagagtaaaattttatgattatctgccatttcatctttaattaaattcatagttgccttaatttttcccgaaggaccactgtaccccctatctaacaattgaggactgcaacatagttcacgaagacgagtaatttctgccaagactgctaatttattctgctgaaactctttatcattctgtttttgaatctgtcttatcaatctttgagcacgtgcctgatataggcgttcttgtttaccaaccatgggcgttaaaaatacctgttcatttttcatcggtaaatcattaaggacatcttgcttcaaacgacggagcatgaatggttgtaccaaacgttttaagtcgtcctgagcttgctcatcctgatttttaataatcggtccttcatactgtttgcggaactgctggtaggaaccaagtaaccccggcatcaagtagtcaaaaatactccagagttcgcttaaccggttctcaatcggggttccggttaaagcaaaacgctgcttagcattgatcgctttgaccgttttagcggcagcagtttggggatttttaatgtattgggcctcatcaataacttcaatattaaagagatgcccttcataaaaatcaatatctcgtttagcggcatcataggaagtaataatgatatcactttctgtgctttgtgcgaactgtttccgccgttcagctttactaccatcaaggacggttactttaagatctggcgcaaactttttaagctcgtcttgccaattatagataactgccgctggagcaacaattaaattctgtccgtttccttgttcacttaacagaacagtaataacttgcagggtcttccctagtcccatctcatcagctaacagtccaccaaaatgatacttcattaaggttattagccactggacaccatcatattggtagggacgcaatgttgcatgaagatttgccggcaccttaaaatctttctgcggagttttaacatcagtaactagctggtgcaattctgaagtagtacgataattcaatgcttcttggtgggataaaagatcatcaagataaagagcacgatacaccggcaatttaagttcttccgcagtaaaatcacgtgatgagattcccattttgcgcaatgtctcaactaattcagttagcgaaggttcatccatcttcaaggttttcttgcccaattgatagtactgtttatgcggccggaaatctcttagaatttgcttgatttctttagcagttagttgatcatcaccaaaatcaagctttaaaaggccagaatcaacggagataccgacacttaccttagtaaacggctgtttgtataacccattaaatgcaggagtagccttagtaattcctatttcttgcaattcattgacgccagttgctagcaaatttgttgcctcatcaactaacagaactgctctagtcccggtttgattaaacttggtgaaatatttagctagtacctgttcaactctttgcatcaaaaattgcggaaggtcatcaattttcttaattttttgtgtttttccatcaatttcagttgccaagtcacaataaatttgttcgtcatgataatccaataagaaaactactgttggtaatggaggtaaaaactttgataaatcgcgatcttggggcatctcgactgaaaacatcgactgaatcttgggtaacacatagcggtaaaactcagacatagtatcaacaccaaaaacaagatcactggttactggaaaaacagggtctaacttatcaggggctattcctgtaaaagcagtccaggtatggtcatcaaggtggtaataggctgcctgtccacgaataaggtcagccggaaggtcaacactaacatcaaggtaacgacttggatcgtcatcagcaccatttgctttaattgaaactgctgcttttaatgcacgttcttcccgcttaataggcactttccaccgattataaagcatattaccggtctttaatatttggtcaacttcatccataatcacgccagccaggggcagctcattttttacggatgcttcgtaatacccatcgcgcgttaaatcagcggtcgaggatagcttgatgatcaagtctaaccattgtttactatctttatcaaggttttcgggggtaatttgctgatcaaagaactttcctaaatgaagccgctcaccacgggcaatcccatttgttaaggttgtcaagtttggaaacttatacatatgatctggtacacctgcccggaagtaaaggtattgaccaccatcgtagtattcaccgatattagcagtaatgatcgtctgactatcaggatcgcgatcaagaaaattagctagcatttgccgggctgcttcattagtattctcttcaatattatgttgatcaaggtaccttaacaagtaataaagggcaaccatttcagcaatctgttgtccttctcttgtctttataaagtctacctggacgtccacaatcatttctcgattaaaagcaactagcactgaaaagtaatattgtttaaaacgcccagccactgaataattccacttagctccaggaattgtgaaataagcatctgcagctttaattaggatttcagaaataatttgaacatcgtcaagattagtaaagacatgttcaatcagccgtagcggaaagacttctttacttagaaaactttgcggatcaactggtaaacggtttggcggaaaagctgattgaaaaacctcccctaatgatttttgcggttcaatatttgccgaatcatcatcaatcgcctctaaaaccgcggccatatgtttacaacgatggttatcctgcgcatagggacaatcacaatgaagttgagaaaactttccattatggtatctaccagttactttataagcccgatttcccttaacgattgcagaaaaattatcgtcttcatcgattattaagtttttaactttatcgcgatagtagtaatccctaccccgttcataaattcgttgtgcaaatagattacgccagttactcatgtgtcgatcctttcaaatattgtattttcattgattatatagactagcatgacgaaaaacaaatttattcgtaccgtttaagtgttgccccaattcctactagcccaataatagcgccaagggcaataatcggaagtgaagattcatccccggttcgtggcaaaatattatttgttgttttattcttaaaagacttagctaatgaaggctgggtaatcttattctgatctgcctgaccttttattacctcgtttggtcggacggtatgttgcttggtttgcgaagtcaccaatatttctggtgctgaggtttgattatcatcattaacttccactacctgggcagaaagatcattcgcacgcatattattttcttgtgtactatcaattgttttctgtgcaggcgaagtttctttattagcgtctgcctgtttttctgttgcggaaacagtaacttgctcgctagttaaaactaccgatccatcaggaaaaacaatcaagacatcttcagtatgctttccgggacgttgaaggtcggtcgcaactttagcatcatctttccacactacctttgttccctgaggcagcttattttcttgctcatcgccgggtaaagtaataacagctttattttgatgatcattctcaactgcaatcgctgtcgtaactttaggaagaggagtttctcctggctcaattgttaatggttcaaggttgattagcgaactgtactttaaggcatcagtttgcatcggtaatttctcttttgctgacgctaacttttcttgtgaatttgtcttattgagaagtgcttgtaagagcttcgtttgcgcattgattgcttgggattgagcattagcacgatctccttcaatttgtgataagagtacactatcttgccaagctttccgtcttgttgaatctaaattacttttagcatatgtaagcttttcttgtgtctcaataagattgttagtcacttcttccagttgtggcaaaagattcttagaaacacttaaatagtaatttcctgtttctaattcttttttcgcaattggcaatacttcagcagccttcttttgatcttcttctattattttatgatgccaatcaattatctcttgaatatcactgatatccgcagattctaaatctagccatgaacgcgaacgatcctttgtaatccaatcatgataatgttgatattggttaaaagtaccctttttcttttcaatcattatttgattaagctcagttaattccttattaactgcatttatttcataattaatggtacctaagttataataagccggtgtatttttataatcattgtcaacaaagctctggtttcttctaataacctcttttaagagatcaatattatcctgatatgctttgagtttaaaattcttttccgcttgtgcattctgccctttgtaaccatcatagtttgccaagtcaaatactaaaggtttgtctgaattcatcatagtatttaaatagaatactggaactttcagtattcgctgatactcttgttgatactttgttaagtcactttgaacattatcatattcttgctgagcattattaacagcctgatttgaactattgcttattttttcctgtacctttgcttgagaatccgcgtctgccaaattttgattagcaatattaagatcattatttgcggttgctacatcagcattggctctattcactgcgtcttgggctgtactgacatttcgctgagcttgttggttcgtatcaggcagcgtttgttgaatagtatttttactattttgtactgtatcagctttagcggaattactaatggccgtcacccccgttgtaacagccattaccgtcgcagttgttgctaaactcttctttaattttcttttcttcataaataaaacccacttaattatatttaaaattacaaaaggccagtcaatacataacgttgattggtcttaataatctttatcattttagcatactttatactactttcgtgaacgtcctggtaaaggtctttttcttttaccattttagtatatactgagtatacatataaggaggggtaatatgactgttaaactgagacaaactggtaattcaagaacgttaaccgtaccgtcaggaattaaagtaactggagaagaatataccgtaaagaatgttggtaagacaattgtatttacccctgttgcaaaaaggaaaaatatttttgccaccaaagattggaaagaatacgattatcaaaaagatatcgaaaacgacccagcattacagccagtaaaacaagtaggacgtgaggtaattgattaatggaatttcctaaaaagggagatattataattgccgatgcagaacttcacgcaggacatgaaatgggtggacataatcctaaaaaaggaaatatccgcagacattatgttgtcatgagtacatccgcctataatgaggcaacccatatgtttattgggatgccaatcacaaccgctaactattctaacaatcctcgttacatgcccattttaataaatggtagtgtcagcaccggggttaaaggatacgttgttttatggcaattacagaattttgactatcatgctcgcaatggagttattgttaatcatttatccgagaaaatgattaaacaactgcaacaatatgtaaatgatatggttgtcaacgaataatataggaaagcactatggagtaagtctcatggtgcttttttgattaaaaaagtgagtgagaattaaccgtcttgtcaaggaagttaatttccgctcacctatttatattattcttcaaatgcctttagctgtttccaaaacattgggagcaagaataactggaggaataatacacagccagtaaggacacttgtataactaaagaagatcaattctgaaaataagtcggctaagattacgaccgcgatgcacagctggctaacggttaaccattctcgcttaactttattagctgagaagatcattactaattggattgctactaagactgtctgaatcaactgtagtaaaaatagtgaatgcattttatatctcctaattaaaaattatcctcgtacattttactacgcgttatgaattttttaattacagcttttttacatctatttaacaactgttgaaacctttttcttcgtagtatacttgcgccacaaggtctgtaaataataagcagcataacaagcaattacaaacggaatcgtacaatacaaggcaattcgttgttggggatcaaaccaaattaagatgcaagaaaggctgctagcaataaatgcaaaccatggaacaatcggataccatggcgtgcgatactttaactcacttaactgatgaccagccgctaaaaagcgccgacgaaaaatgagctcacataaggaaatcgcaatccatacaaagacaaccgccaatccagaaacagaaaccaaaactaaatagaccgttccagccgcatagatgctggaaagcaaagctaacaccccaccaagcatacttaagagcaaggcgaaaacaggaatcccgcgtctattagttttggcgatgacagctggaattgttccttcattagctaatgaccataacatccgggttgatgcgtataggccagaattagcggcagagataatcgcggtgaggacgacaaaattcattaagtcggcagcatatggaattccgagttggctaaaaacgtagacaaatggactttgtgttacccctgccttttgataaggaatcaaagaagccataacgatcatgcttccaacaaagaagatcactaaccgccataaagtagtatggatcgccttaggaagagtcttttcaggatgcttagtttcccccgcggtgatggcgattaattcggtcccagagaaagcaaagtttaccgttaacatcgtcataaataagccgctaaatccacccgggaataggccgtccttagtaaagttgttcagcaaaggtgcatgatggtaaccttgaatcgggataagaccaattactgctaaagtccccaacaaaataaacgcgcagatcgcaaccactttaatcaccgcaaaccaaaattcactttctgcaaatgccttgacagtaaaaatgttagataagaggataataatgataaataacaagctccaccaccaaaccggaatctgaggaaaccagcgcttcataattaggccagctgcggtaaattcggagcccatcgcaatcgtccaagtcaaccaataaaggattgcaacggtaaatccagtggccggcccaatcagatttttggagtaaacatgaaaagcccccgtatacggcatcgcaacactcagctcacctaaacataacatgatagcataaacgattaaggcgccaagcaaataagcaataacggttcccaacggcccagcctgatgaatcgtgtaaccagaactcagaaataggccggtcccgatcactccaccaagcgcaatcatctggatatgacgagcacccatttcacgggctaaatgcgttttcttagtcatgatgggtgcctccttccaagtactcatgcaaagcggcaatatcatgcggcgtagtagtacagcatcccccaacaattgtcaatccagccgcgagccattgtggtaagtaatcaactaaaccacgacgtccatggggatagctccacgtttttgttgtcggatcataagtcgcacttgaattaggataagcaataaccggtttatcagttgcctgatggattgtctcaatggcggctgttacctcttctaatggaatacaatttacgccaaccgcaaaaacatttggatactttgcaacggtacgggcagcaactgctaacggtgtcccatctggtaaatgtgtggaattttttaaggaaaaactgacatagcatagggtatcgggagccagttctttgacaaggtccaattctgccaatacttcatctaagcgcggctgagtttcaattgcgatcacatcgacaccaaccgttaaaatatcagttaatcgtggtcgatgaaattgttgatattcagttttactgaggtggtaatcaccactatattcacttccgttggcaagataagcgccataaggaccaagcgctcccgcaacatagttataaatcccagtttcctgctgatattcatcacgcgcttctttagccaagacgactgctcgctggatcaatgaatgggcctcttgttttgaataaccattcttgatgaatgccggaacatttgcctggtaagtatcagtaatcgctaaccgggcacccgccttaaaatattcctggtgaacttttttaactaatgctggctggttagctaaaacactcgccgtccataatgagttattggtatcagcacctaattgttccaaagccgttgacattgcgccatcaattagtaatggtttagttaattctgcagtaatctttgtcatctttatcccctcctcgtaaataaaaaagcccctcaaaaagaaactagtcttttcaagggacgatcaatacgcggtaccacccaaattcaggaaatttaaaatcctgcactcaaacaaacttattcatagtaataaatttgcagcttgggtaacggtagcaacgccgtgatctgctaattattcaccgatcaatcgctcacaaaccatcttcactaacgctagaaatactgcattgcaccagtcacagctctctattaaatctataattagttactcattcgatctcagcaaattctcatataaattacgattagtataccgagcgagggcgaattcgtcaagggtgtttttaatatgattttaatttataaatggatctgatattgatggcgacacttagttgaatatttccagccagtcgaatgcttagcagtaaagtattcgtcatcgtcaaaaactgggaatctaaaataatggcgacgatctttacggttatggtgagtaagtggatagtcttttaactctcttgcagataagcgcttgcggtgagtacaacgggcatttgcacccatcgaatgattgacttgtccatgcttgattccactactagaatgagaagtcaaataatgaactggcctccacggtttgcaaggcttagcaatcgtttcaactggtatttcctgaccaagttgatttgactgagccaggtagttaagctgaccatcccaagcttcatgcgctttggcaacctcataccattgcttagctttcttgtacaagtcttttaatttttgttcctcaatttttttgcaatcatcacaatcaatctcaaaggaggaacctgcacctgacactacacgtttaatactgtgaacatttcggtaaagagtcaccgtactaaagaaagtaaaatctattagcggcttagcattattcagcgcctttaccaattcagaatacatatatactttgtcatcatgactgtaaatatagtcatgaataacataacaattgaacattttgcataatagtcctttcagggcccaattgacttaggccacttatgcaaaaccggtttgatgaatgaataacattgttgtacctccatatttttgactaatggtgataaagagttaaggtatctgttctaggtaatgatacttttttatatcatcatcagatagtagcgtattttgtcctttactatatgctctatcccatggcgtaccattattatgagttggattttggtctgaattctcaaatcgctgtccagaatcaaaaaaattagcatattttttgaccgaattatcaataaattccttaatcgaaggatttaatgctgctttttggataaaatcataattcttttcttgcaattcctttaaattatcctgggcctttcgccatacttttcgatcaacagggccatggtcgaaagcttgaaatgatgctaagaaaagacgatgtcccttactctctaagtagtcagcataactataatatagaactttttgaagaggaaatgcatgtaagttaaactgagtctttaaataacccgccacttcctcatctgtaagttgacttttttcttttactttttttatgaaaaatttcaagtcgtgatatgcaagaaactgcttaaaatatggatctttttcacataaagaatcaaatgaagcatcttctgtagcaagaatatgcgaactaaacgataatggaatatctttaatcaattcattaaagaatctttcatgttcaaacacttcatctaagttatctgaaccatagtggtaggctaaatcttcattatcaactgtaactaattcgactaattgaatcatgatttattgcctcctccttctaaaatattatctcgttgtttttcatgagcagaatgtagttttttattttgttcttcatcttgaatatcccaaatctgtaactcccacggaaatgttttattattttccttgaagtaacaatgaaatgctttataaccattatcttttctgtaataataacgccaaattattcctttgtctctataatattcaagaattaacttaaccttatctttattcatatttacatctggtaaaataagcctaaaacccattaaatcattaattacttttccaatattataagcaccttcgccagttctttctaagaagcttttagctcttaacttttctgtcgcagttttatacctttttattctatatcttaaatatggtaataagtttttacaagaggtattaatttcattaagtttatactgatttagtaaatccagatattttggaatggtgaataatatctcttcgtttaatgcatctgtacatgatgttttattcattttatagatctttggatgtccactaaaatatatttgattataattcaaatagagctgattaattaacgagatagtttcactcaatatttcaatcgtatccacaaacagcaccccgtcatcgagcgtatattcgatataattttaccatattattgagtataaaatctatattttagaataattactattgttactgttattcttacgagttaggaactaaaaaatcaaccaacatatttacgctgattgaccttagcaatattatatcggatttaacttacttatcctgtgagtgccgggcaccaatttggaagtcgtccgagtgttcaaacatgtatttaacggttaggggttggtcacctgtgagcttctcaaaatcatcggttttcaaactcatctttccttcacggattgcttgaccaaacgttaccatcccgtcacttgagaatggtgcttcagagtctttcttgaactttccatcagttgtacgaggaacacccattgcatcaaaaatagcatagttctgttcatcagtaatctcttggtaactaacattgttcccagtagcttcattaccaatttcaatgaatttactaattgtcattgcttctgccccattaatatttaagattgcagagtgataatcattagaagccaatgcataagccgccgctttaccacaatcttgacgggagatgtaggccattaagccatccccttgattgttcttcaaaataccatcgcccttaacgtaggtaaaatagttagtgatcattgcctcggcatattgcgagttgcgtaagaaaatgtaatctagaccactatccttaatataattttccgtataaatatgatccttcttttcaacacttggatttgttggatcatcagcattgactaaggaagtataaataatttggtcaacacctgcttctttagctgcatcgacaacattcttatgcgcagcctgacgtttagcaccaacaaacggcatagagattaatagcaatttttcaccattcttaaatgcatcccctagcccttctgcatgattaaaatcagtttggtgagtttcaatgccaactttgtcataaggtttgagcgcatcctcgttatagctgcaaaagattaatctttcagctggaactaatttttgaatttctttagctgccactctccctaagttaccatctatacctgtaacaattaatttcttcattttactaattctccatcttaataattactttgtagttcatttcacattatgttttaaagtataatagaaagaaattcatatatcatcgtcaataaagcagtaattatttcctaaaaattactacattatgtaggagaaaacagatgaaactagaacatattgtgagtaaagtcgcaaaagattattatttaactaactcattaagagaattagacattagcccgttaaattttaagctagctggctctgcgtttcagatatatcagggtaataaaatggtaagtaaaatcctaattagtcctaaatcgttaagtaataagcaacaatcgtggatccgcactacccggactccagaggcgcttttaaatttgttacaaagagaggttattgactacttaggatgggaaaatcagttagctgatgctctttcgtataagcatcctgttcaacgaattttacaggttattcaagcaaagattacaaattcgcttttgatttttgattccagtttaaagcttctcgggcatagtgaaggaaaaggtaagccagtcctagttgattggttaaagaccattaaggcaggatatattagagttgcagataacgcaaatgaacatttagtgcaagcagtgcattcaataagagaaggtaacggaaaagagtatcgatttgccgactttaaccaacctttctatttgcaaaagatcggtttacggaattcagatcacttctatcttgccattgttattgttgatcgttctaactttgaaaaggacaaatcaacgatcgaatcagtgattgataaaatttcagcaacagtcgggctgcataacttcccctatcaatcacaaggaaacaatcttgagggtttgcttcgtgatattctagtgcggccaaacatttcagtaagtgaaattaaaaatcgtctccaatttgaccctcatcaactaaaacgaccattaagtgtgttatgtataaaggctccaacaactaatatccaaccattaagtgtgttatgtataaaggctccaacaactaatatccaaccattaggaacgatcctaacgaggtttattagtttccactatgatgattacaatgtttatatggtggaaaatagcagtccgctcatcaccaaaacgattatgcaagagttagccccttatttaattagaaataaaactggtgcagggctgagcaattctttcactcatctgcaccagtttaatcaattctatcaacaagcagttaaggcaataagactggggaaagcaaacacgtttaatcaatatcatgattacattgctctcgatcttcttgatcatatccgccaagatcagtctttgaatagttatctaagtccccaaatacagaaactagcaaaagaaaattcagaactatttaaaacattgaaactcttccttctaaatcacgagaataagaaacaaaccgctcttgaccttcaaattcatcgctcgacgttagattaccgcttaaataagttagaacaggaatacgaaattaattacaacgcgccaagagaatatctttacgtttttctgtcctgtttgcttgttggataagctaaaaggcatcctcactaaaagaatacggggatgcctttgctataacaagaattacaatcttatttaatcactaattgaacctttttctggatttcttcaaacaaatcagccggcattgtttctacaaattgccatttacgttgatgaaagtcaaacaattttaattgctcaacataattggtcatcagctgctatcctctcaaattctttaggtgttaaaaaatgatatttagtagaatcacttaactgattagtagaatgagccaaagtattattatttgctttactttgtaatagataattagtctcttgccaagagttatattctttttccgatattacaacaacattcttttgctctagacgtgcaacaataattgtttcattatagtttgccacatcatcagcgtatttctcaaatgattttctaaagtctttgattgtaactacttgtatcatagcttatcacctcgcttatattagatcagccaagattatatttgtgcacaagtgtaggtaatcaaagtaagcggttacgattcagccatactaaaagagttcagtctatatcaatatgtctagctttggcagtctccaatttactatactgattgagacttagacttacattattaaatagtctagaatttaataataatatgaaattcatgaagtataaaaaacaaaaaaagtactaagataactaaataagaccagcaaaaaattgggcgaaacatacatttaagaaaatagcaaatcggcttgctgattattatatgcttgcccattatcattactttcatgcttttgattaaccaagatttctgtcgttgccgtatactttggtaccacgacgaactgggccacgacataccccaatactccggctaataatgtccaaataattaacatcttaatatgtttacgacagagcatcattaaccgatgcaaatcaattgtattattcgctgtttgttgtgaactattcacgacttctactcctcatgtatttaattttttaaactattttgtaacaagttggtgatccgttgttgctcactcgttggcaccacttcaaaggcttgaccatcttcattttgccctcgcccttgcgcatggtcttggacgatgtgttcgttcgtatcacgataactttgtgctaaccgcatcatatcattaaaggttaaatcagtttgcgagttatcagatactgaccgtaagaatgaccggttaagaaccgttttatatgaaacggacttcttaagcagagcagtgattactaaccgttgccgttgttgccgaccatagtcaccatcgggatcgtcataccgcatccgactaaatgccaatgctttctttccgttcatatggtaggtctcacccttttcaaagtgatagccttcataatcaaacgtcaatggggacttgacatcaaccccaccgacttggttgattgccttttccaaaccacccatgttaaccaatacatagtagtcaattggaatatcaaagtggtcttgaattgtattaatcgattccttgactcccccataggtataggcagcattgatctttgctggtgaatattgcggataaccaggtaagttaaccttcatatcccgaggaagactaataatcgtggtcgtcttcgtctttggatttaaagtcattaccatgatcgtatccgtccgacccttatagtcccgaccaagcgccccggtatcggtccctaagaggaggattgagaccggcttcttttggtcaaggaccttttgcgcatcccgtgacttggtagcacccgcgctactatacatatcatcggtcgttgattttaggttgtgccatgccattcccgcaaagaacagggcgactaggactaatacccctacaactgaccagaagatcttccatccccggtgacgccgatgatgtctgtggtggtgatggtgatgttccggttgttgcataccatcatcattattattcaagggtcgactattttcgtctgacataaaaaatttctcccatttttgactaacgccgtaattaaaaaaatccactagtgcaacaagttacattactagaaacctacactaacaatggtaaataacgagttgcgaacttttttaatatcagttgtcagtcaatcaaatttataattacttaatacattattaagaatgtaatatgaatagtcaaggacgaatttcataactttttcacactttcgtcaaatcatcaagttccttctcactttccttgtgattatatcagccttttaacgggtaaatagcgaattctgatcgttaatcatctgatcgttaatcacctgtttatttcattttagttacaaattcaaatttggttgttttgcctaataaaagcgcccagaaaactttccttaggcgctcaccgttcattacatatattcattaagcttctcattatactttatcaattctgacatactggtatctttttccggctcaacaatctgcgtggaagctcggttagcagagtcatccatttgttgccgaccccagacactcatggttaggaccatgttacgtaagtcattcccatcatcggtcaatgaatacttgttttcttcatcaacaactggattaacaattcgcaagttctgcaaggatgttatttcttccttaaaagcaacatctgtcaactcaggtagcaattgatgtaatccctcaatggtaaatggccgaaagcctaaccaaaagataatccgtggttgccagcgatcttctaaaacatctagtgtgtattttacgccacactcatctttcttttcagtcataaaaatgctccattctattacttaagctactcctcttcaccacctattataataagctaatggactaatgtttatttattgtgcatttttgtgatattttttacattaaaacttatttatcacccgttttacttcttttacaagttctgctggcgtttcttcgccatatactttcttatgggccttattcaggatatgtaaaactgtctggataaagagatcgagtgctagctttcgaagtttcgtataaacgcaataatcaccaaagtaggttcgttcgaagatctcccttttcacctttccgaggcgatacatccaatattcaaagagagaaagttgctccttagcaacttcatctgcagcacttacaattcgccgaaaagtacgttcagaggtggcgatttgaatatgatatttatctccctcgcgaccattcataatcatttctatccgcttatcgctttctagctcactagcgtcttccatcaaatgaaccatgtattgaactactcccacttagctaaacctacggtttaatgcttgaagtgggagattctggaaacatcgcatacttaccctaccgattctgaacgaaccttcaagcagaggttacgactattagccaaggctcgtcccgagcctaactttatctatcggatagctaatcctttttgcaagatgacttgtgcagcgttaatatcacgatctaaatgtttaccacagtttggacaatcccactcacgtaccgctaaccattccgacttattcaatcctaaccgatgattattcttcccacaattagcacaaatttggctagtatatgacggattgacctgaataagctttttaccgtaccagtcacacttatattgcaacacatctactaattttgaccagctagcgttagcgattgctctagctaaatggtgattcttcatcattcccttagtattaagtttttccaacacaatgatgtcgtactttttaaccaatttagtagtgaatttttgtagctgatccaaccgttggttggcaatcttttgccgatacttcgccaccataatacgagctttctgataattcttaaaatcatctaattgccgtggaactaacactttattatgatgatcccaggcgatttcctgctgagcctttaagaaccgacgactacgcaatttctcccaacgatacaactttttatggtatttgtcttcaaaatgattgatcggttccttgcatccatctgaaagattaagtaatgacttaagtcctaaatcgccaccaatatatttacttgttttaggaagagtttggttttcgctttccactaaaacagtaatgtaatattgaccagcaacgttcagacgaacagtgacattcttaattttacccattggcaatcgaccagctctaaaatagacgataccgagttttggtaactttatatgatggcaatctaaaactttaatattgccattaacgtactttgaattgtagctctgagaatattttctggatttaaatcgagggaacttattttgacctttaaaaaagcgttgaaaagcatcggctaaattgcgattagcactttgcaaagcagttgattctgcttgtttcaaccaaggatactcaaccttaagttgtttcaacagattattcatcccaaaggcattcacaaatttagcttccggattattcttgcgccgttcaatttgcatattaagcatttgattccatacaaaacgaacacaaccgaaggtttgccagagctgatttcgttgtgctgaatttggatagatgcgcattttaacggcttttagaaccattattttctcccttgactttcaatatatcgttttacaacttctaaaggcgctccaccagtgctaattaagcaatagctttgtgtccaaaaggctgatttccaaagatattgcttgatttctggaaattgttttttgaccattctggagctagacgatttgtaagcatttaaaaatttagccatttccgtatgaggcgttgctctaaacaaaacatgtacgtggtcctgatcatgattccattcttgcaaattaatgccgtatgcttgtcccacaactacaaaacgatgtttaagatattcagatatttcatcgttaattacttttcgacgatacttaaccaccattaccaaatggtaattaagtaagtatactgaatgctgatttctatctaattctattgttatcaccacattttatagatatatactaaatatatcatagaacaaaagaaaaagcactaacgtgctttaagagagcgattcatcccctacttatagaagtgggggtattctcgcaaatttatggataaattaggttcgtctgtgcaaaacgactaaggacatctttcaaccgttcccgaataagcagctgttccccgtccgcagttaagacaaacgtccgattttgatcgtaagccgttaacagtaaggtgttatcccactgaaccagatagtttgccacctccccatcgatttttaatttatctagcatgctcatatcaatgattttacgtaccacaattatctcctccaagcaaatcttaaaaaagtgcaaattcgctgtaaaacgtttcacttttaacatgaatattaagatactgagataaatctgccctgtcaacgtctttttaggacactttcgccctattttatcgttcgctaagacggcagattttttggtaagttaacggtactcaagagctcttgagaatattttcaaaggatgttctcaagaatgaattatcaaaaaatttctgaagttttaacttttctgatgagcgataagcggatcacgattgtccatggagtattgaagagtctcgggatctcaccacgccgggacgactatgatgattttgtccaagatgcttcgattatctttgcccaggcctacgctgatttcttacaagagaaagatgaagtcgaaaacgaacgggacttgatgtgctttgcttatcaacgaatgcgctggcgcttactggaccggttacgacggcagcaacttgaaagtttcctctttaattacaccctcgacagcgaagaagatgatcatgactacggcaagacaatggttgaccattcagcgaccgcgccatttgctcacctggaaaatagcgactttcttaactacctctaccaccactgtccccgcgttcaacaacgatatttgattgccaaactcaaccaccatttgagtgaccggcagattgcggatgagtatagtgtcagccgggcagctgtttcgcaatggcggcgcggagtaattacccgggcccaccagcttcgtgctaaaatgaaaggagagttttgaggtgagaatgtggaaaaacatgaaatcgatcatcaagctaagtggctccatattaaatatgatggcgaagatcgtgatgatgagtgcgttaatgagcttagtatttatcagaacgctgacgagcctgagctacaaatgctggtgtcaaatattgattttgataatatcagccatgataatacttttgcactgacaaaagaggacgcgaaagtattgattgactacttgcaaaagtgggtaaactaaaaaacaggtctggaattgtcacacagggcctgttttttattcacttacttgatcttttcccgatcaaaactttcacccaacatcttccaataatccatgatcatcgcaaagtcaatcggaccttgaatctcgaggtcaagttgggtaattttttgtaactcgttactcaacaaaacccggaagtcagttaatttaataatcgtcgaatggggcgatggtggtaccaaactaaggacgtgatccatgagatcctcaatcagccccgcgcagaagtccattaaatcctcactgggcaaggcagttggttctaataaatgctcccgctctttatcaaaaatcttataccagtgtgacatcgagttccagtaggcattgtagaggcgtttgctttccttatcagcgtattctaactggtaacgacttaaaactttccactgttctaacaaatcaacatagagtgattcatgagggaaagccgcgtcttcccgggtttccttaataaagtgtgccaaatcatcagtcatctgaaccggtgttttcattttcatttctctcattttccttttatattagtttgttgaatggtgagcggtgtttttaattaatctttcccataaaactgcgcagctgcaatggcccgttgccatccccgatacaagtcagctgccttttgcggatccatctgcggatcaaactggtcgccaatccgtgatagcttccgtaactcatcctggtcttcccagaaatcaacggccaatccagcgagaaaggctgctcccagcgcggttgtctcttccattgctgcccgcttgattggcgtttgtaagatatcggcctggaactgcatcatgaagttgttccgtgaagcgcccccgttaaccgttagtgctgttagtggtaattgggtgtccttgaccatcgtatcgacaacatctttggtctggtaggcaatggcttccaaggttgcacggatgatatgtccccgttcagttccccgggtaaggccaaacattgcgccccgcacttcttgatcccagtacggtgcgcccaatcccgtaaaggcggggacgacataaacgccaccagtggtcttggcatcaactgccatttgttcggactcgcttgccttattaaacatcttaaggccatcccgcaaccattgaacggcagaaccggccacaaagatactcccttcaagcgcgtaatgagtttgtccgtccagaccgtacgcaatcgtcgtcaacaagccgttatccgaaagcgtgggttttagtcccgtattcatgacgatgaaggctccagtcccataggtgttcttgattgaacctttatcataggctgcttgaccaaagagagctgcttgctggtcacccgcaatcccggcaattggaatctggacaccatagaagtggtaatcaccggtataaccgtagattgctgaacttggctttacttctggcagaagcgactgcggaatctcaagcaagtcaaggatatcttgatcccactcgagggtatggatattaaaaagcatcgtccggctagcgttagtcacatccgttgcgtggacccgccgtcctgataatttccatagtagccaagtatcgatggtcccgaacattaagtcacccttcgccgctttttctcgggcaccagggacatggtcaaggatccacttgatcttggtggccgcaaaatatgaatcaatcactaagccagtcttcttgtggatcatatccttataaccatctttaatcaatcgttcggcaatatcgctcgtttgctttgattgccagacaattgcgttataaatcggcttaccggtatggcgatcccaaataaccgtcgtttcccgttggttagtaatcccaatcgccgcaatcttatagggcttgatctgggacttaatcattacgtttgaaatcaccgactgaacgctatcccaaatctccaggggatcatgttcaacccaccctggctgcgggaagtattgaggaaattcttgttggctgatcgcaaccttatttccgtcatggtcaaagataatcgcccgtgagctcgtcgttccctggtcaatcgccatgatatattgttgttcactcaattatattcatcctttcgctgctaattgcgagcagtttctacctatataatgggaagaaacttgatggattttagatcatacaaaaaagccaccgtgcaaagactgaactgcctcccccgatgactctcttgttgttacttgtcgctgaccatcttaccagctacactatagcggtctttgcgcatctcattcaacacgatatgcacccgttcggcaggaacgttggcatcctttgaaattgctgctgtaacatcctttacgagagcctttaactgctcatcggtccggccttcaatcaagtcaatatgaactaatggcataatccgtgcctccttctaaattcatttaaaatcttaccataatagcgcttttacggcaattacattaacgaaaaatattttaattaacgccgcgcaaggcttcacgaacctcttcggctgctttccggtccccagtaaagaggatatgatcaccatactcgataatcgtatcaccatgcggatcgattggcttgcgcttccggaaaatccgactaatcgtaatatcattaacaaatggcaatgtatgcagttcacgtccagtataacgtgaattaaggacggttgcttcgtataggccagcttcagtatcggtcagcatccgcaagatcaatggtgattcaattaaggcacgcaggacactgctttgaacattgaaactattaaagatctcaatccctttttcccgaagagcactgacatctttcgggtccaaccgcggattattttggctggcaataacccgctttaccccatgttctttggcaatctgagctagacgcgctgacttatgatcatttaagaacccaacgacaacaatatcacaatcaaagtagcctccctgctccagggcctccgcgtcaagagtcgggagatactctaaatgcttcacctgactattataggtcttgaagttattttcattgtccgtcaccatccgcacgtcataccagttcttatataattgttgggaaattggaacagttaaggtgttggttccgataaaattaaccttttgcttgatcaaatcagacttttcaagcttatacattgaattgaagacgattggcgcaatgatacagataatcacggcggccaatgtaaaggcatccgattgcgcaccagtaattgcatgcaaattccgcgcaacttgcaaggttggtaataccaaggtaatcgttgtcgctactaaaaagctgcctgcaaatgaattgcggggcttaaaacgccgtcgataaatgaacatggttggcaatttagcaagtaaaaagccgatgaccaaaatcggaatcagggctagcgcttggtggttagcaaataaattcttcaagtcaaggcggtcacccgtcatgataaagaagaacggaatcaggaaaccataaccaattgagtttaaccggtcttcagttgcttcactaggctcaagcagtttcatgaccatcccggctaggaaggctcccaggatattttctgctcccaccgtttcggcgattgttactaaggcaaagatcaagaagaaagctaaccgaatatcaagttgagtggttgatttggaaattttattaaaccaaataaacggttgcttaaaccgtcgcaagaggaaaaaagctgccaagaagaggaagacaattaagcccaagcgtttggcattgcccccattaatggatgcatagaaggtcaatgcaagcatcgggaccacttcccctaataccgccgtcaataagagggtctgccccactggcttttgtaaaatatccttttcttttaacgttgcgataacaactccgagggcgacggttgaaaaaataattgttgctaacaaaatatcgctaaataagtgcaaacggctaataattaaggcaatcacaaatgaagaaataacaatgaggccaaatgcctgtgaagccataattaccggcgacttactatcacgctttttcccgggcgttttgcggaacaggtcaaaattgatctccatcccggacaaaaacattaacataataacccccatcgacgacatcatattgagggtccagttggggttaacgatatttaagaaactttttcccagaataatccccgtgataatctcagcaatggcggtcggaattgaggaaaccttaaaccgcgccataataataggaataattaacgccgctaacataacgattaacagtgataattgttgcatattttctttctcccttcctattttatacagcaatattatatacttcttaacttgaaattaaaatattcgttagtgtaagattttcataggttggatgaataattcatctggtcgtggaaatcttttttgtagaccaatttacttatttacaaaaaaagaaaagaccagtagcctttagtgtgtcgaatactaagcaaaggcaggtctttcctcatggatattttaacagaaatcgagcagaatttggtgaaatcaggcagtttatttgaagctgaacagattattttaaaaggggtattggagttaggacaagtaatcatgcaaaactttttggaaagcttagatcgaagcttaaagtcccaagctccagcgaactatcaagtaatcaataaacagccacggacgcttaattttatctttggcccggtgacttttcaacgacggtattatcaggctgggacaaagaaacgtgaattttacttagaccaacaattaaaaattaaaccacgtcgtcgtttatcgccacactacttaatgatgatgtctaagattgcccaaacaactacaatgcgcaatactgccgacattttgaaccttgtatttgacagcggaattactgccgattcggtaatgcacgccgtgcatgagttaggaaatcaggtagctaaacaaactcaagcaaaagaacaccaagctactcctcgccatatgcctaaaaatttaactattgagggtgatgcctttatgattaaaggtaaaaaagaagcaggtcagctgactcttgtgcaccattatcgggtttatgagcgagtagctaatcaaatcattaatcggcatgactttctcagtgttgggcaccaaggacggcttgaagcacgactaagtgattatttagaccgccattataagcttgccggtcaaacgatctttttggccagtgacgctggcccaggttacgaaccagctaagctattaagcctagttcctcaaggtgcacatggtgaatactttctcgaccgctatcattgtttacagaaaattgaacatactttaggccggcacaacgaattagccatgcgagcaattaaagccgttcgtcatcatgatcaatcagagctaacaatattttagatacttatgaatcacaaaacctaacggaaaaacaagcagacgacctaatgcgtttaagaaagtatctacagcgaaattggcggtatatcctctcaccacaaatgcgcggatttaaggatattcatttaattggttcagtcgaaagttctcaccgggcttttacttaccggatgaagaaacagggcaagtcatggactaagcagggggctaaagccatgattggtttaattgaagcccgaatgaatggtgaactgcaagctagtttaaatacaatcctagaacaattaacagttcttcctcgagtggctcaaaccagcctattacaggaaatgcatattcgaactggagagtttctaagaaaggcaccgacaaagccgtcaattggagcagtacaaggaataattccgattaacacggccacaagtagaccaatgggacaactttttaaggcactaacccactaaaactgtatatttaaaggctacctatgaaaacttgacagatacaaatattctaactaaatcgacttaaatcgtggttcgcggtacaattaatatattacacaaaaggagaatttattatctatggggaataaattaactgcatgtacaagtatattaattggaaaggatgctagtatcgacggcacgatcatgatcggtcgaaatgaagatgctaaggctgcctggcccaagcacatggttgttcaccagcgtggcgaaatgcccagtcacttcatctctaaggatacccgtttagagcttgacttgccagaagaaagcgctcgatacacggcgactcccgaatggacagataaagatggtttatttgaagaagacgggattaatgaatatgatgtggcaatgagtgcgactgaaagtgcttattctaatcccctcgtcttgggctatgatccgctagttgaaaatggattaaatgaagaagcgatgatcaccgtggtgctaccatatgttaagacggcacgtgaaggagtccaacgccttggtaacttgatcgcgaagtacggaaccggcgaaacaaacggggtacttttcgccgataatgatgaagcatggtacttcgaaaccggagcaggtcactactgggttgcgcaacggattccggatgattcatacgcggtggtcgccaaccaactggcaattcaagaaattgactttaatgatacgaataatttcatgttccatcccggaattcaagaatttgttgagaagcatgacttaaaccctgatccagctactttcaatttccgcaaaatcttcgggacagctgaccggtcagatgcgatttactctgaaccgcgggtatgggttggtcatcaaatgtttagtccccggcaagcaacggaagagaccccagaatcaaccgaactgccatttatcatgaagccggaccataagttatcgatttttgatgcccagaactatctcagcaaccactatgagagaaccgaattcgatccgcttggtcatggtgagcacgctcataagtaccggccaattagtttagcaaagacccaagagtcacatattttacagatgaaccgaccgggcgctaatattcactggttagcaatgggagtcgctgccgaaagtacctatgtgccattcttcaacggtattaccgatacgcccgccccgtataagcgtgggaagctaccggctcagctcaactctgcttactggattttcaagcatgccagtgtgctagttgacagccacctacacgattttcttccattattacgggatgttcagaaggaacgaaacgccgcggccattaagatgattgccgaaactgattgtcgcctcccgagtctcaaaggagaagcacgagcaactttcttaacgcggcaaagcgacgactatgcgaccgatactttgaatgcttataagaagttaagccttgaattgattaccaagatgactgattattgtgaattaaactttaatacagatgagaatctgtaaaataaaaaagaagcagctcctaagttggaatttccagcttaggggctgcttcttgtatgcacctaaataaacgaggatcaaagagttttacttcttcaaatcctcgtttatcttaattttgatgatgtttttcaactgccgtaactagttcttccaatgattgacttccaaaaataactgggtcatcatcaatcatcgtcgctggaacactcataatcttcttttctttccgtaattctgggaaatgctgcaagtcaatcatcgtggcagtaattcccacattcagagaagccatccgttgacaagccgcaacaacatcaggacagaaatgacaagttaaggaaacgccaatccgaatcttagtcggcgcaagtttcttaattcgttctaccatttctggtgcaattgtttgtccaggaccggcaacgttgtagacacctagaactaaggagtttaattcgtgaccagttggaatccccgcataatgtaagccagtatcattaccatccgcatcaagcaagcgcaattgtggtaagtactttacgtccgctggcgccggtttagtctccatctgcaggtgcttatcaagtgaagcaaattcttcaacaaagctaactaactgattgctaagctctgtcccattggttaacacttggagtttaatatccttagtcaaacgggcaaagattggttgtaactgttggtcaatctcagctggcagccagtttccttcatgcggcgtggtgttttcttgttgactaagttcgcttgtctgtcccacggtcttagcaggctttttattagtttctgcatgaatcgggataccttgcttttccttttgcaaaataatgtatcgttctgcagcagtagaagcaaccgccccatcggatgcagctgtcacgatctggcgaagatttttatggataacatccccagcagcgtaaacgccatcgatgtttgtcttaccattttcatccgtcatgatatagccccgatcatccaaatcaaggatattagctaatgctttcgttgctggttgcgtaccaatataaatgaacatcccaaatgtctggtcaccatcatcgacatggtaaaccgtctcttcgccagtcttattattaaccaaggtagcagtagtaaggtaatcatccccactaacttcctttacctcagtattgtattccacactaactttaggattatccaaggcacgcttagccgtcaatacaggacatgcaaaatgatcgccacgaactaaaacagtaacgtgcttggcaaagcggctcaaatagtcagcttcttcagcggccgcatatccgccaccaacgacaaagacttgaagaccggtaaaaagttcgccatcacaagttgagcaataagcaattccccgtccacgaaattcattttcaccgggaaaaccaacttttttagggttagcaccagtcgcaataattacgcttcgggcagtatatttttgaccactcttgccaatcaatgtcttaacttcaccagtaagatcaaacttttcaaccgcatcatgttgaatttcaaccccaaagctggcgacctggctttgcatctggttcatcaattgggtaccgtcgactttttcgacagctggataattataaaccaccgaggtcgttgttacctgaccgccgacagtatctccttctaaaattaacgtatccaaggttgcgcgtccagcatataaaccagcagataatcccgctggtccagcaccaacgatgattaaatcatataaatgttgttctgccatttagctcaccaaattaaagcttaccaactagatcaagacttggcttaattgaatcttggcctggcttccagttcgctgggcagacccggtcaccatgttcacgaacaaattgagcagcttggagtgtccgtaagatctcatcagcactccgaccaattcccatattattaattgtgtaggattggataataccatcaggatcaacaatgaagactccccggtatgcttgaccagcgtcttcgtcaagaacatcgaacatccgggctaacttaccagctgggtcagcaagcattggatatttgatcttgccaatcttgtcagaagcctgagcccatgccttgtggacaaattcggtatcctcagaaacagagtaaatctcagcgtttgctttcttgaagtcttcgtgcttatcttgcaaagcttccaattcagttggacaaacaaatgagaagtcagctgggtagaagaagaaaatactccacttacctaaaacatccttcttggatacttcggttgtttcaccgtcatgataagcatttaccttaaaatcttcaatttcatgtcctacaaagttcatgtatatcctctccttaaattagaatcattcttaactgcaactcttagtataatctttttatgctaatttgcaagtaattttagaataattccaaaaagatcaaatttccttgccgaagattttcgtcttaatcgcctgtccagttggggttccagccagtccaccgaggcctgtttcccgtaaatcaactgacattgaccggccaaccttatcaagagcagaaatacattcatcggccggaatcatactcgtacaaccagcgagtgccatatcagctgcaattaacgcgttcccagctccaatcgcatttcttttaacacaagggatttctaccaaaccggcaatcgggtcacataccaagcctaacaagttactaagagcaattgccaatgcttgactgctttgttctggactaccacccgctgcttcaacagccgccgcggcagccattgccgatgctgaaccaacttcttcttggcagccgcctgtcgcgccagcaattcccgcatgattggcaataattaagcccaacccaccagcagtaaataagaagcgaatcatctgatcttcactaaggcctaatcgttgttctaacataaaaagagcgccaggaagagtcccggatgaaccggcagtcggggttgcgcagatgactcccattgctgcgttaacctcgttagttgcgatcgcattttccacggcagccatcataacatcaccagagagggtctttccttttgcacgatattttttcagcttaatcgcttcgcctccagttaaaccagtttttgaccgaactcccagctcattttcaccttgtttaattgcggctcgcatcgtcagtaagtttgatcgcatccgttgccaaacttcttttcgattgctaccagattcatgacattctgcctcaatcactagttcggacaatgctttttgctgaatttctgcagttcgcactaaatctttaacactttgatacatcgctctttctcctaaagacaaattgcagccgggtacttcttttcaaaataagcaatcgtcgctggctgcatcggttttttaatatcgtaaacataaatatcacaatcatctgcccgtaatacttgtcgccgggtaaatggtgctttttcttccaaatcagtattgatcgccagtgcattggccatctgtttactataatcgcgaaagataacaattggtaagggacccgctggtaaaatatcaacaccatcaaggttaatagccctaatttcaattatcccgccaccgatcgaacaaccagcaaccgttaccctcgtcttatcaccagtcatttgaaggatggctgtgttaggatggtgaatcgggctttcaccctcttcttcaacaaagcgaaggtccattcctccttggcgagcaatcattggcgccgatggaactcgtgaatcgtctggcgcaaatcctagcaatcccgccgcaattgcatagtctgttccatgaccacgatgcgtccgagcaaaagatccataatagtgaacggttactttaggtggaaccgtgccaaaaagtttatttgcgactcgaccaatcttgaccgcccctgcagtatgcgaactagaaggaccaatcattactggtccaataatgtcaaaaacacttttatagttatttttcatgttgttgttcccttaaaaaatcgagtaggagataattgattagttcaattatcgacctctcacaccaccgtacgtacggttccgtatacggcggttcgacaacttaatcacattgaattgactggagcgtcttggacatattcataagtccgagttgttccagttttctattagttagagaatagctcaaggtcttactgtgtgcagttcgccagtagcccttgcgggtactagcgaagacatatgcatcacgctgggacagccccagcttctgtaagttagttaccttagttttaagcttcttccattgcttccagatatactgtcttattcggaccctcaaccacttgtcaaggcgttgaataaagtcagttagtttcccaattgagtagtactgaagccatccacgcatttttcgctgaatttcttcaaacattcttgtcagggatattccacgattacgtttagttaataacctcaatgctttctttactcgttgttgcgattgtttagctggacgggcgtaggctccattgtggtctacacccaacgaaaagccaagaaactttaaccgtagcgggctaccgactttggttttatctgggttcactttaactttcaatcgcttttcaagaaactgggtaatgcttcgcattactcgttctccggctcgttgacttttaacataaatgttacaatcatccgcatagcgcacaaagtggtgaccacgtctagtcaactctttgtccaactcatttagatagatgttcgccagtagtggtgacaatggccctccttgtggggttccttttccactcttagcgaaaagcccatggtctaagactccgctagttagaaacttacgaatgagtcttagtgtccatgggtcatcaatatattgttggagatacttaatcatcaagtcatgattaacgttatcaaaataggcttttaggtctaagtcgacaactcttcgataaccttgattataaagatctactacttttgcaatagcgtcgtgagccccacggtgagggcggaagccaaaactattatcagagaaaacacgctcaaagataggtgtaagaatttgggccacagcttgttgaaccattcggtccaccactgttggtattccgagttttcttactccaccattaggcttcggaatttctacccgtttgactggtgctggtttatacttgccctcacgcaaactagcgatcaactccgtcttattttctctgagatatggcagaaggtcattgactgtcatatcgtcaatgcctgctgcccctttatttctcttaactcgcaaataagcctgattaaggttattgcggtccaagactaagtcttggatagtgacactcatacctttaccttcaccataatcggtactacgcgcccttgtgtactttcggttttccaaacctatcctcgacaagcggtcagcttgttgttctgttttctgcgattgtcgcacctgattacacctccgatataagttacaagttgttgtcgttcagtccttcatctgattactcagactactatgacctcggctgacttctggcttactcaacgctacatcactgcaccgcttgtttctgtggaaattaaacttattcctcttgtcggaaacgtgtaggccagatctccccgggtaaggatattaactttcgtaccatgtcatcgttagctttactgagaccaacttcgagtagtattggacttcaacttgtctagcagccttatccagttaatttcagccttatagctacttcttgttcatcgatgcagtactttgccttagacttccttcagattccacctcacggtggacacccttgtccttagctcatggttccgactactacggcccatagcggactttcaccacctagctaatacccatgccgggcgcactaaaatagaggttgaaagaaaaatcatgtttttctcaacctcttcattataattactttttctttttatgaaagtcaagaaatgaccagaagccgcgatgaccaccagattttttcttcggtttcttttctgcttttcgatcttctttggcagccttttcagcaagtgctttttgcttggcgagaattcccgcttttgccgctctttttcagcctcttttcgggctgccattgcctttttagcccgtgctgcccgttgctgagcagcttctttcattaattgtggccgcgttccattgtatcaaacattgttgccaccttaatagctgccttattggctaaggcttgatcagtatttgaagccacttcaatattatgggctgccgtaatctcacgttcccagtattgttgtgtcttaataggtaaaccagcaaactcctggctccgtaagaactgacctgctcgtgataactgcatcttcaacgaatgcttatccgtttgctgaccatttaatgcttttcgcgaattataaatcgcttgatcaacaaggtcgaccattgcttgtggttcattatatccctctttatgctcttgaaggacatcctcccccattctaatggcttcatcataaagacccttagaacgatcagtcccattaaagtatttatatgtttgccttacacgtacttgatcagctacatctttacttagttgatcaaaaactactttttcgttcattagatttccaccgcccgactttattcgtctactattcttagtatagcagttattgatcgcgaacgaagctaaaatgtcaattttttagaagattatcgaaaaaggaggctgagaaaaaactttgttttttcaacagcctctttaatctatacgaacattatttaagatatcgtggaactagcttcgcgtcgtaaccacaaggctcaagtctaagtccgaacgataatcagcccgtgccgtgctaatcaccgttctatccttagcccaccgccttgtcgagaaggttaattcccactcactccttattaccaactagccttacgaacaccagggatttgacccttgtgtgctagttcacggaacttaatccgtgacattccaaacttacgcatgtaagcatgtggtcggccatcgtaacgatcacggttgtgaagacgaaccgcactagagttacgaggaagtttggataaaccgatgtagtcgcccttcgcctttaattctttgcgcttttcagcgtatttctttactaaagcttcttggtgatgtaatttagcaatctttgacttttttgccattaagtagttctccttttatattaaaaactttatctactatacaattactatttaaaattaaaacatctgcgaactcttttcattttaatattatcgctgatacttacaaaaaatacaaggattttgcattactttttgacttttcttaaccatttaattttttcgcgtatttacggtattcgtcagcataattgtattgattattatattcagttaaaagttcatcatcatgggtataagcccgtcccgtcaccatcatcttcttgtaaaggtcacggtatggcaaatcactcttatcggcaatttgtttttcctgatcgcgactatatccaatatgacggaagctagtttcagctaaaccaatatcgtctacttccaaaattagatagtgggctcgcaaatcacgctggagaggttgccagtggttgaatggctcgccgactgctccgggatttaaaaccatgcgttcatcactcccataccgtaaaaggtcatggtgaacatgggcataaatggcaatatcaactggttcgccagcgacattaaacagcttatcaaaattttcactaacttgcgtgggaaaaaggtcttgacccatattaagccacggcaaattatgagagatgccaaaattaaggagacccacgcgtttcgtaacgtgcatcggccaacttgcaatttcatcaatcattccgtcaggggcatgttccgcaacatactgggctaaccgtgcaaagtaaatgtgggaaggacgctccatatccatcatcccgcgagcgccacgaacaactaggtcatcccagtttcctcgtacaattactgttggcttcatttcttgcaaaatctcccaaattggttttacacttgggcctggcatcagtaaatcaccaataaaccaatattcatcaacatgttgcgctatgctatcgcgatacattgcctgcaacgctgttagatttccgtgcgtatctgaaaagactgcgatcctctttttcacagatgatttcccctttcttaccttcattaatatattagcaaattttcgaaaaggaatgctaaattaatttgtattttcagaatgatttcccacattacaaattattttgttacaatatacttttatgaacaaatcattttaggagatgataatcaaaatggattcggaagtcgcaagaggaaaatttcctcacggttggcaccgaactttttacaccctctggctcggcgcgttcatcaccgggatgggctactcgatgacgatgccgtttatctcactttttattgcagaattaggaaattttacgcgttttcagctcaacatttactccggactagcatttggggtgaccttcattagtcaagccattgtttcaccgttctggggcagtctggctgatcgcaaaggacgaaaactgatgtgtatgcgtgcatcgggagtaatggcttgtacaatctgtgcaattggatttgctcaaagtgtctggatgattattggcatgcggttccttcaaggagtcttttccggctacattaataacgctactgctttaatggctggcgaaacaccgcataataaatcaggctgggtaatgtcagcgatgactactgcgggggtggccggcaatttggttggtcctttgcttggtggtttcctatcagaattgtttgggtaccgaatcccatttttcatcaccggagcactaatgttttgtgtctttctcagtacgtggttattgacggtagaacattttaccccgattaaaaaagaagcgatgaagccaatgaaagagataattcataatctggataatccaccattgatcttcgttatgttcttaaccacaatgattgttacttcttctaccatgtcaattgacccaattatcagtttgtatgttcggcaattgatgggcggccacggcaatattgcctttgtcgctgggattgttgctgctactccaggactaggaacattgcttgccgcttcaaaggttggtcacacgatggaccggattggaccagaaaaagtattacagattgggattctcacggcctttatcctctttatccccatgaccattactaagtctccatgggccttggcattttggcgcttcttgcttgggttagcaaacgcggcgttaatgcctgctacccaaacggtcttaacccttgacgtcccaaccgaagcattcggccggatctttagttacaatcaatctttccaggctgcgggtgcggtgttagggtcaattcttgggtcattcatttcgggaatttctagttatgaaatggtctttgtcattactggtttgactctcctgcttaactttatcttggtgatgttggttagaccaaagaagcaacttacagaataacttaaagaaaagagaaaatcatggttcaaacaaataaattattaaatgaacacgaagtaaataacttattttcccgggttgccccccgctatgacttattaaacaatgtgattagtctaggaacgcagaaaatatggcgacacgaactttttaaccagcttcaaattaagcctaccgataacgccttagatgtttgctgtggaacgggagacctcacaattgccctggctaagcggatctctgctggacgagtaaccgggcttgattttaataaagaaatgttggaaatcgctaaagaaaagacaaagatgattggcaacctcttcttggtacaaggggatgccatggcgttgccgtttgatgacaatagctttgatatcgtcaccatcggctttggcttacgaaatgttccagatgcagataaggcgctcagcgagatttaccgggtcctcaagccaggtgggcaattcgttagcttggaaatgtcgcagccgaccaatccaattattaaagtcggctggaaagcttactttacggcctttccattgatggcttcattagctggtggatattaccgcgattatcaatatttaaagaaaaccagccaacaatttgtctccgcccaccaactggcgcggatgatgaaggcagttggatttaaggaagtccattaccaaccattgaactttggcgcagctgcattacattttggcgataaatagaaagggagcgaggtagaagtcactcatgactatctcgctccttttcaaattattaaagaataatattgacaacattaaaaactgattataatatactggcaagcaatttaataaccgcaatgaaaagatgagtaattgatggtcgccttctccagagaactgcggatgatgggaagcagcgttggctaagttagtgaagatggtcttggagcgataaaagttgtgagctatttgtaagcagcttacgggttggtgtacgatataacacctgagtattccctttgagtacttgtagagagtttggctgtgaggtcaagctaaaatagggtggtaacacgctatcaatgtctaatcattacgcgtccctagaactaacaagttagttctaggggctttttttatttcacgaaaggagtcactattatgactgaatttactaagagaaccacatcaccatttcgctttgatattgttggcagtttcttacgcccaaaagaattaaaggaagctcgcgctaaatatcaggtgggacaaattacgaaagcagaattaaccgcaattgaggataaaactatcattgacttaattaagaaagaagaagcagccggtttacacgccgttactgatggtgaattccgtcgtagctggtggcacctcgactttatttggggattggagggaattgaacagtcaacttctaatgcaggatatgagtttcatgatgaaacaacaagagctgaaacggcaaagttagtcggtaaagtaagcggaaataatcatccttttgttgagcactttaaatttacacgtgaccatgttagtactggcacgcaagttaaacaaacaatcccttcgcctgctcaagccttctttgaatttttgtgcccagaaaacattgctagcgtcattgaactactcccacttagctaaacctacggtttaatgcttgaagtgggagattctggaaacatcgcatacttaccctaccgattctgaacgaaccttcaagcagaggttacgactattaaccaaggctcgtcccgagcctaactttatctatcggatagctaatcctttttgcaagatgacttgtgcagcgttaatatcacgatctaaatgtttaccacagtttggacaatcccactcacgtaccgctaaccattccgatttattcaatcctaaccgatgattattcttcccacaattagcacaaatttggctagtatatgacggattgacctgaataagctttttaccgtaccagtcacacttatattgcaacatatctactaattttgaccagctagcgttagcgattgctctagctaaatggtgattcttcatcattcccttagtattaagtttttccaacacaatgatgtcgtactttttgaccaatttagtagtgaatttttgtagctgatccaaccgttggttggcaatcttttgtcgatacttcgccaccataatacgagctttctgataattcttaaaatcatctaattgccgtggaactaacactttattatgatgatcccaggcgatttcctgctgggcctttaagaaccgacgactacgcaatttctcccaacgatacaactttttatggtatttgtcttcaaaatgattgattggttccttgcatccatctgaaagattaagtaatgacttaagtcctaaatcgccaccaatatatttacttgttttaggaagagtttggttttcgctttccactaaaacagtaatgtaatattgaccagcaacgttcagacgaacagtgacattcttaattttacccattggcaatcgaccagctctaaaatagacgataccaagttttggtaactttatatgatggcaatctaaaactttaatattgccattaacgtactttgaattgtagctctgagaatattttctggatttaaatcgagggaacttattttgacctttaaaaaagcgttgaaaagcatcggctaaattgcgattagcactttgcaaagcagttgattctgcttgtttcaaccaaggatactcaaccttaagttgtttcaacagattattcatcccaaaggcattcaaaaatttagcttccggattattcttgcgccgtttaatttgcatattaagcatttgattccatacaaaacgaacacaaccgaaggtttgccagagctgatttcgttgtgctgaatttggatagatgcgcattttaacggcttttaaaaccattattttctcccttgactttcaatatatcgttttaaaacttctaaaggcgctccaccagtgctaattaagcaatagctttgtgtccaaaaagctgatttccaaagatactgcttgatttctggaaattgttttttaaccattctggagctagacgatttgtaagcatttaaaaatttagccatttccgtatgaggcgttgctctaaacaaaacatgtacgtggtcctgatcatgattccattcttgcaaattaatgccgtatgcttgtcccacaactacaaaacgatgtttaagatattcagatatttcatcgttaattacttttcgacgatacttaaccaccattaccaaatggtaattaagtaagtatactgaatgctgatttctatctaattctattgttatcaccacattttatagatatatatactaaatatatcatagaacaaaagaaaaagcactaacgtgctttaagagagcgattcatcccctacttatagaagtgggggtattctcgcaaatttatggataaatgagacctttgaacaaatctcctttaactctgctttcttttaaattagcccaatcgcaaacgttacgacttgaaccagtgagccaattaataatattttaactgcacatggaaatgtctctttcttaacttgcttagcaaataacattcttgtttgcttaaccacaaatgggataatcaataaggttaacaagactgtccatggtacgaaatgaagaaccgcggcgaaaataatagctaaaaatgctaaaacgttcttaatagcaaatgcatatagaccatttttctgcccaataaagtgaataactgtatgacggcgattgtcttcatcttcacccgcatcacaaatattatttgctaataataggttggaaatccacaattcatccggtaaagcaacgagaaagacgaccccgatatttgcccaggaccatgtaaattgctggccaacattaataaagacagaaataagggtaatcatgaaccccattgtaaatcccgaggcaaattcaccaactggcaaccctgacaaaggaaatggaccagaagagtaaagaatgccgatcgcaaaacaaaagattcccatccatagtaacggaaggccaacacgagtaactagatagattccgattaagccggctactatactaaaggcaagcaagagaccgagaactaaacgcggtgaaatattttcccgcccaataatatttgtatttttcttataatcaacggtatcaatggcatggttataatcattataattatccatcatatcaaccgccatattgaataatagcattgcaatgaaaaacagaactgaatttagtaggtttagggaatgataataatagacactaaggcaaaccccgaggagcatcggtaagatactagcagttttggccttaatttctactaattccaaaaaaacatttaacgacatttagtaaattttcctttcataattccttagttgttcggtacaatatagatggtacaccataacaaaggaattatcgattaatgaaacaacattttttccatacctatccggcgattaataacgctctaggtaaagtaaatcaaacaattaatgaccggattacaattaaaaatacccaactacacgatgccctacaacaaatggcctcaaatggtggtaaataccttcgcccagcattcttccttttatttgcaaatatcaatcatcaaactgccgatgagcaagaaagactaattaaaattgcctcttcactggaggttttacacatggccactttgatccatgacgatattattgatgattcacctaagcgtcgcggagccgtcagtgtccaagccgcttttggtaaagatacggctgtctatacgggagacttcctttttactatcttctttgacctcctcgtagaaacgatgaccggatccccctatctgacacgaaatgcccggacgatgcgcaaaattcttaccggagaactaggacagatggataatcgctttgatcttgaccaatcattactcgattattatcgcaatgtaaacggcaaaacggctgctatttttagtcttgccgctgaagaaggagcctattttggtcataatgatcgtcggactatcaacttagccaaacgaattgggcaaaatatcgggatcagcttccagatactggatgacatccttgattattcaggggatgaacgccttaacaaacctgttttggaggatttagcaactggtgtttactcccttccccttcttttaaccttgcaaaatcaccggcatgaattagaaccgttacttgcaaaaaaacgccaaatgacgattgaagatatggaaaaagtccaaaagattgttgtcactcatggcggtgttaaaaaggcgcaagaaattgctactaagtttacacaaaaagcgcaaaccgaaattgatcaattagcagataagcatacccgaaagatgttgaagttggtagcaaagaagttattgacgagagtaaattaaaaaagataagactaaggaaattccatttctcagtcttatcttttttattcttgaaccaagatctcaacatcccacgaatcaagcatcgtttcaggaaaatcgccagtcaaaaggtctcgatatcccttttgaaattctactggtaatggttgtttaccctttcccatattaaggacaaagtaaatatcctgacctgctgaattttggcgttttgttatctccaattctgtttgctctttgactaacgcggaaaggtgcacatcatcaacaatatgcataatgatcttacggagactagcatggtcaaggcgactaccaacataccatgctttcccttttgaataggtattctcggttaccgcgggagtccctgcataaaattcactagcgtatttagccaggacatgggctccattaaggcaaattaaatctgctattaaatgtccagttagttcattcccggtcgtcattgctaatttaacatctttatcaggaaggattgcatcgctttcttcaacccacagccccattacatcttttaatggtccaggataaccgcccggatagatattatcggattcatttaccattccggacataaaactagtaataaaattaccaccgtttgcaacataatctgtaatcttcttgcctaagccatccttaaccatgtaaaggaccggagcaactacgaggtcatattggctaaaatcatcatcaacggaaattacatcaatcggaatattcagctcataaaattgccggtaataattaagaataattggtacatattttagggcctgggtaataccatcgacatactcaaaagaccagaaattactccagtcaaagataagggccacccgcgctttagtctgagaatctttaataaccgggcccacttttcttaaatcatgacctaatttcgccacttctttaaatgcccgggtatcagtccggttggcgtgactaatcacagcaccatgaaacttttctgatccgcccagtgcctgcttcaactggaaaaattgaacagtatccgcaccatgcgcaactgcctgtaattcagtggccgccatctgtcccggacgttttaatgggctatatggttgccagttaacttgtgatggcgtggattccatcagcataaacggctggtgctttaaagaacgcatcaaatcatataagaatgctggctgataaaccggtgcatcataagacggataactatcatatgatataatgtcttgcgcactagcccactgctgataatcaatcattttattgggcagactatgaaagttagtagtgactaaggtcgttggatcatacttttcaatgatttgcttttccatcttaaataaatcaagcatttgggtcgattgaaaacgtaaataatcaattgaaagtccggcgacaattgtttccgatccttctgggccccatgcatcaccaagttcattaggcacaacaatctcattccagtcataaattgtatgactccacacattcatattccatgcatgattaagattatttaaggtttgatagcgcgccttcaaccattgctgaaattctgtttggcattcttcacaataacaattgccaccatattcattattaacatgccaagcaacaatatgcggattatcgccatatcttttagcgagctgttcaacaagatttttcgctaagcgccgataatttttactgcttgggcaaaagttatgccgggcaccaaatacatggcggcgtccttggtagtcgacccgcgcaacatctgggtatttcttgaacatccaagcgggcatcgcggcggttgaagtggcaagaacgatatcaaaatcagcagccgttaattctttgataattttatcaagcttggtaaaatcgtattttccttcctgcggttcaagcaaaccccatgaaaaaacattgatcgtggcggtatttatatctgcccgcttaaatactttaatatcttcagcccacgtttcttctggccactgttcgggattatagtcgccaccatataagaaacgaggcaattctttcttcatcattatctcaccttatttaaattctactgttactaccttatcaccatgcttaataagcttaccgggagtaaaaccagccgttgcttcaatattatgtggttgcgcaaagaaagtaattacccagtcttcgtaccctctttgtctaatcaattcacgatcaaagtcaaagagtagctgcccctttttaacgatttgaccgtcattataatgggcattgaagccttcaccacgcatgtttacggtcccgacaccaatatgaacaatcatttctaatcccctgtcagaagtaataccaaacgcatgacgggtgccaaacgtaaagttaatcttcccgtcaaatggggcgtacaatttatcgctagttggcctaatcacaaagccctttccggggaacggttgaccatcacgatcgacgacttctttcattgcaactaattcgccatctgttggggcataaatcgtttcttctttaagaccagtcgatgatgtcgacgcttcacttgtcagttctccttgtgctaatttatcctttaattcttcaactacttccgcatgaacttcttcactcaatttcaccttaaaaagaaagacaaaaattgacaaaatagctaataccagcgggatatagaatgccatactatcgaaagtccgaatatcatgacctgtcatgtcagcagcagtcgcgctccccgtcattccggctgcgattgcgatataaccgacaaggccatttgagatcgcccctgttaatttatcaatcattggtcgcacagcaagaacaaccgcttcatttcgttgaccagaatttaattggccatattcaattgcatccgttaatgttaaaactgttaccaattgggcaaaattaatgttaaacaagaccaatccaaagtccatcattaaaacattagagcgggcaaaaataaagattaaatatgctaaactcatgcagacttggccaccaatgaatagccattttcgtggaataaatttattcaaaataggataaagaggactagtacagaaaccaataatcgtagcgatgaccccaacaatccagaattcaccaggtttaccaataacaaacttgtaaaggtagaaaaggacaccattagttacaacataggcacatgaataaagtaaatatgccaaacttggccataagatttggtcattgtgaaaaattgctgaaaaaacttcccgaatagttgtcttatcctgggcagacttacggatcacattgtaattttctttcgtcccaacacaaacaaccaaggcacagataacagctaatgccgaaataatggcagcaaaggcaaaccaaccagcaggcccctgccgatgatgaccagtagctaaataagtaaaggtcgttacaatcggtaccacgataatcgttaatccattccaaccaagtgttcccgcaaaggcaccgagagcggtataaacgccccgctcttcagaatcttcacttaaagcgggcaccattccccaatacgaaacatcagaaaattagtagaaaatatcaaacgtaatgaaaataataacaaataaaatggcaaaaagaacccaattatattttgctaagccaaagattccggtaaagaggattaatagcagaatcgcactaacgatatttcccattaaaatccacggcttaaattttccccaccgacttttagtattatcaacaatatttcctaacagcggatcaattaataattccaaaatccggacagaaacaatcaaaccagtaatcaacccaattagtttattagcaaccgttttgtttagtcccgcgaacattccgcttgttacaaagataataaagtaagtactcattaccccataaaatgcagagtgtcctaagttaccaaagcaaaacgaagcacgagaaataagctgcttccccgtgagcttatggctatgtgtcatatttataacctccaaactacagctttctgtaatcgcttacaaatatattataattctttagctgatttgagtaaacatttatttaaaaagtaaattcattactagcgaagatataaaaaagtagctaatccgtgaatcgctgatacgaatactgattagctacttattttctttgggaaagcttttacgaaaaacaatattggtatttactgtcagatgaacgtgcggacgctggggatgggttattaaatcttggagaaggttaatcgccatccgactaagcgtttcttggttgatattgtatgacgttaacggcggtgaaacatacttagcaactttactgttattgatgctaatcacgacagtatcacgtggcacaattacccctgcttcattaaaagcctggagaacaccaacacttaacgtatcagaggcaataataaaggcttctggtaaattaccaccgctttgttcaagaacccgtttaccaagttgataaccgtttttaacattaaatggtccgtccacatataatggcgcttcttttatcccttgcatccctgtaaattcacgaaaggcgatttcacgggcatcagcttgttggacgttattgagattaagtccttttccaccaatgaaaccgattcgttcataacctgctttggcgaggcgatggagagcatcctgaatcgttaattcaaggttaggttgaacggaatcaaataattgtggcatcggatttatatcaacaaaaactccatgtggtaagtattgatgaagttcgataagctggtcctgcgttacccggtccgcacccacgccaataaatccttggaacgaatcagccgccgcaattaaatctttgatattactaaagatttcaacttgcgctcccgcctcatcgacttctttaataattgcattgcgcaaaaacgcaaaatattcatcttgcagttgttctttaccgcttacccgatacaataatgcgaggttaggacggattggttgctgctgagagtttttcttgtggttgttccaatagccaagctcgttagccaccgtcatgatcttattgcgggtgcttggactgatcgataaattttggtcattattcaaaaggcgcgataccgttgctggtgaatatcctgatttttccgcaatttctttaattgtcgccatcattttcacctcttttagtaatgggtttagtaaatattatacactagtttgaagatagagatgataattcaatctactaattttattcttaattattttcccttgtttatttcccttaaaatgatcataattaagaggacgagatttattgatgaggagatttacattatgaataaagtttctaagggcccttgtactcgctcttgccggtattactgttggaactagtactggacttagcactaccctttttcaatcaaccagtgttgcctatgctgctgagatgacaaaggaaaaaatgatttagctaatcgttatattgctgattatttaggcaactgtcaacagtatgagcagaatgataaaacattcaaaggcttttcttcaatcaaggatattacctattcgcgagacaataagattaaaattgacgttaatgatgacatttatcaattgcctaaagcacgtcgttcacttttgattcaagatttgcaaaacggtgtgtacggcacattagcagacaacgaccttaagaagttatctgaaaaagacattcaaaagggctgtccaactactgtttacttgaatggaaaagtaattggccacactgccaagaatgataaccaccacattatttgggataaataacaaaataagagatttgggacaaagctggtgttccaaatctcttattttcatttaaagatcaatttctagaataattggcgtatgatcgcggcgttctccactatcgatcattcccgcttctgtaatcttatcagcaagccggtcactgactaaccagtaatcaatccgccagccagagttattttgtttgctggtaattacccgttgtgcccaccaagaataaactcccttttcgtcggggtggaggtgacggaaactatcagtaaagccagcagctaatagttttgagaaatgcgtacgttcttcatcagtaaatccagctgaatgatggttggttgctggatgagctaaatcaatctcttcatgagccacattaaaatcaccactagcaattaccggtttttgctggtcaagttcatgcaggtagtctcggtaacaatcatcccacgtttgccgctcatctaaccgtttaagcccattgccggaatttggtgtatacacttccgtaacatagaagtccggaaattcaagggtaatgattcttccttcatcatccattggttctggcgcattaattttaggataagttactttcggctcatattgggctaaataaaggtacatggtcccagcataccctttccgtgctggctcaacggaacttcgccatgccacttcataattggggaataattcttgtaaaaccgttaaatgcttcttagttggcccattctttgacaacttggtctcttgaatggcgatgacatctggcttcatcgctgcaatcttttttaatacttcccgcgtttcccctgcccgtacggaagttccagttagtgctgcattaattgaatcaatgttccacgaaataaatttcacagctatttctcctttttatttcttgatttaaggtcgctttctttgatgaataccccatcggcagttgtcttacccgttcgctttgcaatttcttgataagctgcggtaagtgcttgttgatggtcaacacccactaatttacaaaagattagcaatgcaatctgtaagtccccgatgctatcgataagcttagtccgattttccttattatacgcactcgaaagttcgccgagctcttcagccatcttcataaattcgacacgtggatccgcgtggtcaatcccacgttcatgcgcccacttatcaattttttgaaatagctcctcgtaattcatcaaatgtcacctcatcaagtgataattctagtcttaactataaaataaaagaactagctacgcaataagaaaatttcacgtaagccttcttaacagtatttatcaatcaccgctgttataattattgctaagggaaggaagtgaaagaaatggacttaaccaattatcgaatcgatcctgctaagtttgctttagcttgcgtgcaaagttcacctgatcttaccactgaagacaaattaagggtttacaaggaagtatatgaagaagcgcttactttctatcaccaaattcaaacagccgttattaataaaggtcgttcaaaggaagatcgcagccttaaggaaatgggagactttttcgatttaaagaactaaaccaatcaccgaaatcactacctatcaaaatctcccgtactacattgatggtgaactactcggccataaatgaccgagcttctgggaacacgaagtagtatttaggatattacacaagtattcttgctacctaacttacagaactccgttcttttaccaaggctagttcctagccaacggcttttaatcctttttgcaagatgttaactgccgcattaacatctcggtcgtggtgaacgccacactttggacaagtccattcgcgaacttcaagtggcttcttgccactgttaaagccacaatgcgaacagatttgactggtatagtttggtttcaccaagactagttgtttgccataccaagcacacttgtattccagcatcgtccggaactgataccaactagcgttagcgatcgacttcgctaagtggtgattcttttggagattcttggctttcaaatcctcaataacaatcacgtcgtactgcttaactagagccgtcgttagcttgtggaggtaatccttgcgcttgttggcaattcgttgttgataatgggctttaacaagtcgggcgcgttgccagttctgataatcattgagtgctaacttggtatcttggtggttgtgattccattggcgaacggcaacggttgcccggtggcgccgcttgctgaatttactttgccacttcgttacttgatgttctaacaatttagcgttgaaggtaccgtacttgacaccatcagaactaatcgcaaggtcggccaggcctacgtcaagcccgaccatttgccccgttttcggtaaccgttcaacggttgtttcaacttgcagggagaggtagtaacgacccgtcgggtcataactgaccgtataacgcttaattttggcctcaccaataagagtcgttttactcgtgcgtatacttccgagttttggtaattgtaaccgccgcttggcaagtaccttgcacgttgatcggccagtgtaggcctgataggccacatggcggctcttaaagcggggatagccaccttggtgcttaaacaatcgtttaaaggcctcggtaagattatggttcaccactaggaaactggtggaatcactttccttgagaaagggatattcacgcttgagctgtttcaagaggtagttcataccatactcattgacgaagtggctactgggattgttttggtaacgctccttagccatactgagcatttggttccaaacgaagcggtcattaccaaacatttgccataactgatcccgttgggattggttagggtacaagcgaagtttgatccctttaatgaccttgttcattctagttccacctcctttttccgttgatcatcaatgtacttggcaacggcttgttcattaacggccccaatactttcaacatagtaactgggcgaccacaagtgacggccctcctttttccaatagcttcgctgtaattccggacattcccgaaatagctgataggcagtaccgcctttcagccaacgaacaatattcgtcaccgataatttgggtggtgcactcactaacaagtgcacatggtcgtccttcccaatttccatgtgggcaatttcaaagccatatttagcggcgatctcatggataatccgtttgaaggcgatctcgacccgaccggtaaggactttgtttcggtatttggttccccaaataatgtggtaattaaggttgtagaccgatgttcggccatatgtaagtctgtttgtatctttcataccaacgattataccataattcacgtttcccatatacgcccgtcgggcgtaaaaaaggggggcaattcatcacgtccttaaaagaacgtgtttccttgccccttttcaaaaatgttttttaaaattaatttactttgactagggactgtgacataagttaagttactttcataaaaagcaaatacgcagtacaacgatggcctctaacgtccggcaaaaccgatcgttagaggcctattgttgcttgcgggggctcccagaggctagcttcgcgtcgaaaaacgaagtcacaagtgacttttgtctcgctcccctttcctacgattagtcaagaaaaatatttagaaaagaagagtatactaaaccaaccctaaatttcaagaataagttagccactggactcaaataaataatactgaccaattgattattggttgatggagctgtgatatctcttggtagaaggccttacgatagatatccattgacgaatgtccattaaacatagctcgtggatagtgattcatccaatcattagtcgctatgatctgagcactactatagttatttatagcttcacctttggtaatctccttgcggagaaaccggttattgatctcattggatccacgttcccaaggggaatacggatcagcatagaaaacatgatcgtgaacttgtgttaactcactaaattctgaaccgttgtcagaggttattgtcttaaagatgcgatagtaagcatctgtgcccattttctggcgcaaatttatgaagaactgatttactgcatgcgcagttttaccagcaattttactcgtgatattaactcgtgaaaggcgatcagtcattactagtacaacactgtcattaccgtttttctgtccctgaactgtatctagttcccaatggccaatttcggaccgttggtccgcagtttgaggtcgttgagcaatattaggccctaagcaccttttagcttgcggatgagttcgatgatgcttacgtttaggcttttcaaagaggtctaaattggacgtacgaagcacaccctcattaatccattgatataaagttacaaccgactttgggatcagggtgccatcattcattaaatctcgagccttataaataaccgcttgtggggagtaatggtggtcgtcaaactcaccaagcattagctgatcagctaatcgtaaaaattgctttgaagaataatataagcgacgacgaccagaatggcggtgatgttcaagatatgtggcctgaccagcttcataactatagatgtagtaagaatattcgtaaatcttaccattagatttttgacgacgaagttggcggaccgtaccacggttgagctcgttattaattgtttgatgattaactcctaattggcgaccaattgcgcgattggaaagtccttgcgactttaaagtcgcaatcatcacacgttcttctttagtaagatgagcattctttttatgagtagtcaataaactagtagacatggtatcatttaagtgcgtcatttgacggacatcctttcatataggtttggttcacttaatatgatacctgatgtcacgccgaatggcgttttttatttaccaccaactgggtggctaacttcattctataatccaccatactaaaccaactcggttcttcttcaaaaatcgagaattagtggtatattaaaattgtgaggtgattatgccttcacagggaccattgagtccgtataccgatagtagtatttttcatggtgcttaatcatggataagagacatttcagagttttattcatacaagctaccatggcgaccttgttcagttttggatgaggtcgtttttcttttaaacgatagtaatagtcaacgatatgattagaattagcgtgttgttggcggatcatattacctacagtaaaatataagagcttacgggcaatcgggtttccacgcttattaatgtgatcttgacctaaataggttccagattggtaacgacgaatatcaattccgacaaaggcattaagctgattggcattgtcaaagcgactaatgtcgcccaattctcccattaactgagccgcagtttgtttcccaattcccggaaaagagcagtataggatatactctggtaagcgctgggcaatagattccatccgcttgataacctcttcccttttacgggttaaggcaattaattggcgagcatagtagcgaacttcatcaacctgaatggcatcaccagaaacgccggatatgatttttgggcgagatcgattaatcgatcggcatacttataagctttcatcttagatattcgtttatctgtagatgccattagaatattctttaatttaactctcgaataaggcctaactagtgctgaatgaggaaaaagctccacgatattcaacgctaatttagatgttctatttacaaataattgcttaagttctggaaaaacttgttcaagtgcagtatgaagatgatttagacgatagttccaatcagcattgagctgattatagaaccgactaagctcatgtaactgaagatagtcttttttccaaggaactgttaatcgaaaagcattttcctggacagtgagcgcaatccgatgagcgtctttctgatcggtcttaactcgtcgtagactctcggactttaaatgaagttctagtggattaagacggcaaaagcggagaccattggtctcacagaaatgttcaattactcgcgaataaattccagtcgcttcaaagtagataattggcttctgagctttcttaatcatatctcgtagagcattaaaccccgctttcgtgtgtactaaagaaaactcctttaaacagtgtttccctcgataccagacacagtagcttttccccattgaaacatccaaggcaaatatatcagccataaaaagacttcctttctataaatagagctagatataaccgctatcctagatttgtacttcatttcctaaatactcgaactcgtagtttcacaacctaaaagcaaaatatcaaatcaaagatagcggagatcattttataatacggactcgaagtccctgggagcatgatcgatcttagctctatcttcagaataatcgagtaggagataattgattagttcaattatcgacctctcacaccaccgtacgtacggttccgtatacggcggttcgacaacttaatcacattgaattgactggagcgtcttggacatattcataagtccgagttgttccagttttctattagttagagaatagctcaaggtcttactgtgtgcagttcgccagtagcccttgcgggtactagcgaagacatatgcatcacgctgggacagccccagcttctgtaagttagttaccttagttttaagcttcttccattgcttccagatatactgtcttattcgggccctcaaccacttgtcaaggcgttgaataaagtcagttagtttcccaattgagtagtactgaagccatccacgcatttttcgatgaatttcttcaaacattcttgtcagggatattccacgattacgtttagttaataacctcaatgctttctttactcgttgttgcgattgttttgctggacgggcgtaggctccattgtggtctacacccaacgaaaagccaagaaactttaaccgtagcgggctaccgactttggttttatctgggttcactttaactttcaatcgcttttcaagaaactgggtaatgcttcgcattactcgttctccggctcgttgacttttaacataaatgttacaatcatccgcatagcgcacaaagtggtgaccacgtctagtcaactctttatccaactcatttagatagatattcgccagtattggtgacaatggccctccttgtggggttcctttttcactcttagcgaaaagcccatggtctaagactccgctagttagaaacttacgaatgagccttagtgtccatgggtcatcaatatattgttgaagatacttaatcatcaagtcatgattaacattatcaaaataggcttttaggtctaagtcgacaactcttcgataaccttgattataaagatctactacttttgcaatagcgtcgtgagccccacggtgagggcggaagccaaaactattatcagagaaaacacgctcaaagataggtgtaagaatttgggccacagcttgttgaaccattcggtccaccactgttggtattccgagttttcttactccaccattaggcttcggaatttctacccgtttgactggtgctggtttatacttgccctcacgcaaactagcgatcaattccgtcttattttctctgagatatggcagaaggtcattgactgtcatatcgtcaatgcctgctgcccctttatttctcttaactcgcaaataagcctgattaaggttattgcggtccaagactaagtcttggatagtgacactcatacctttaccttcaccataatcggtactacgcgcccttgtgtactttcggttttccaaacctatcctcgacaagcggtcagcttgttgttctgttttctgcgattgtcgcacctgattacacctccgatataagttacaagttattgtcgttcagtccttcatctgattactcagactactatgacctcggctgacttctggcttactcaacgctacatcactgcaccgcttgtttctgtggaaattaaacttattcctcttgtcggaaacgtgtaggccagatctccccgggtaaggatattaactttcgtaccatgtcaccggtagctttactgaaagtaacttcgagtagtgttggactttaacttgtcatgcagtcttatccagttagttccagccttatagctacttcttgttcatcggtgcagtactttgccttagacttccttcagattccacctcgcagtggacacccttgtcctcagctcatggttccgactactacggcccatagcggactctcaccgcctagctaatacccatgccgggcgcacacaaaagagtccaggacaataattatttttgtcctgaactaatcttaggttgtttaatttaaaacaaaaaaagaacccttgatacataagggttctgcactactagttgtcgcgacgacgttcagcgatacgagtagccttaccagtacgttcacggatttgctaagctgtttcatctgctattcatgaagtattcacagactattcaattagttaatttaaataggtagaaactcattaactagtcatgaagtattcataaactactcacaaaaaaactaccaactacctaccagataattaacggcatctcttaatgaggtgtcgttttatccataaatttgcgagaataccccaacttcgacaagtgggggatgaatcgccctctgatatgatataattcaactaattaaactggttctaatgcatcgaaaataaagctgttaacattgcttcaccatgaggacactgagtaatttcgtatagagtaacttcgagtttgtgctgagacaacgccacgagttgcaatcaggctaaaaatagctggcgaaaaccaagccagtatgtattttgaacacgtacttaggcggtagtccgatgaaactactaggcccgggacgggccttggtcaatagtcgtaacctctgctcgaaagttcacttagaaccggtagagtaagtatgcgatgttcccagaatctcccacttcaagcattaaaccgtaggtttagctaagtgggagtagttcaatttcattataactccgatataattttcgcgctaattctatattaaatttaaaacaaaaaaggatgccgattaaggcaccctgtttaccggtacggattaagtaacgaactgaatccattttgcatgccggtacttctcatctgatgtgtatattatagcataaataaattatggtacaatactattgcgtgtcgggagtaacgacccaaacttacgcgcaaaaggggtgaattcccctatgaagtttgtacttctcattctgatcgtgccgaacgggctcgttaagcaactactacattctgtaagggttgcaatcaaaaaggctctcaaacacctaattgaggaactacttggttaaactccatttaattccaaaaggaggtgggcgagatgctatttcagcggtggtaattcgtttactatcgctgtttttattatatatcaaaaaagccctagcagtaattgcatttaaaagcttgcaactactactaggatttttttctacttatttaaatgtgccaaatggttggttattatttgcatcacggcaaacaagataaccatattgattatttggacgtggttgacgtaaccacacgtaaccatcgtgacgagaccatgcatcatacttaatctcactattagctggcaatgtagcaattaaggcactatttgtcttagcgccccagcgtaagttaattgctgtaccagtaataaaagtacctttctcagcaaaccaacgatcacccatatcatcaacccagtgattggatggaagctcagttgtaatagctggcgtttcctgctcaattggtttatttggttctggcttcggtgcttcacttggattaaagagtttaatagcattgtcagttaatgtaatagaaccatcaacattgtatccaagcagattatctgtgtgttgccacatatcaacataatttgctgatgggaagtaattgaagtcaggattctttccggctgctttcccattagctaatggatatgccgctaaccagaacatatccatatttggatgaattgcttctaaattaaagttaggcagtaagtacttgtaagtatagaacccagtgtggaaaccagcgttccgaacagtattaaggaatgcaatcactgatgatgttggcatgttagagatttcagcatctaaaatcattaacgtaccaggttgtacattagcttgtgcctttgagttagcaataaagtagtttgcttcggccaccgcttgcgcatcattatggaaacgaccaaagtgatagaaagcaaaccctttaattccaccgccagcacttcgatcaatcaaagaacgaatgtatgggttaacataattaatactttcagttgtcttgataatcgcataatcagcgccaatagccttataatcatcaactgttaaatgactttgaaaacttgcaaggtcaattactgttttacgttctgtcatattatttttcctccttatttcctttataatcaccggttatcttatgaaaatcagctggattgtagtcatcttgagccttagcgacattaagtactttggctaacgagtcaatgattggtgacaaccacggaacttgtatgtccatctgatttaaattttcgacaattgataccaagtattgatagcagaatgtcaataccattacttgtgcaacataatcaaaaccgattgaaattagatatggataaaaagcaagcactccaatcataaggataaaattctttgccaatccatatgtccctttggtcgaatttgttcgagtagctgtgtgattgctacgtaagcctttggcaatccccgatccaatatcaaataacacaagcaaagtaaatccaactattaatggatcgtcaatttgcttggctgcttgatgtaatgctacttcatgataaggtagtgccattaataataagtgcattaaatttcgttcccattccctttctaaatgccgcccataagaaaagccctgaattcggtattctttaaacactaaattctagggcttatttatgtattgtttatttccgaaaggcgacaagtgcctttaactattcatttgttttatctgctgtcttatcagcagaattggcgatttcatcctgtgcattatataccaagttttgaaaatcttgagtatcttttcgtactaccttcttgttagcatcgtacaactctttattggtgatgaaggtattaaaagtatcattaccagcatcgtcatcaaatacatttgcagtaaagttagcgattacttgaccatttactgtggactttcctgttaaggtgattgattttgttgattctaacataattacttatctcctttttcatcgttttgcttcttaagttcttctaattgtgatttcaattgactattttcttgttccaattgagtagcttttgcttcccatgaggcagctgtgtaattagcaaccgccaatttttggttaagactttgagctactaagttcatatcaatattgttcattattaaaaactcctttaactattttcattcgatcattttcgtaccccttacgcttagctttgatttcccaagcaaaatgaatattagggttgctagatttaactgtaaaattatttgctgaacgtgaagaaacccacacgtttccattgccatatggcgttagaaacacttggtatggcaccaatgtattaactgtttctaagaaataaggatcaatcatgacagtaactacaccattactattagtttgtgtttctccaatatcgccaaaataatattcggcggtttcataggcgttaatggctgccatccctcgcgatgttggtacaacggcattttttgaaccagtaacagtaaaattcccactaacattaaaatcactattaaccccaggaaataatccatttaacgataagatacttttaccattagctgtaatattaattgctccatcactattaatagaaaaataatttttcccatttaagcttcctacattaacaaattcatcttgtaatgttattcccccagaaaagccactcgatggtccttgaaagaaatattgtgagaaagtaccttttaaaactgtttgaccattttgatatgttccatccaacactaaattaggtattgtttttaagttattattttgaattggttcaccagcataaagaaaaagttgcttttttgcagcgatatttataaagccatcgcttttaccggcaataccagcaccaataatttcattcccatttaaataagataatgtttgatcgttccagccatgagttctaagtagaaatccatccttaccttctatatctaaacctgatgttccaaaaaatacaatgttatcactcttagtaatacttccataatctggatctaaaacagcatctgaaagagattggcttttgtgaagatacaagcctccatcaaaaaggtaagctccacttgaattaccataagcgctaatagaccctcttgaaatccaaacattattaccttgattgtcataatcatgaattccgtttttatctatccaggcattatgatcaccttgccaaacgtgaagtgctccgctatctaaataaaattcaccattgctacctcttaatgtcccggcagtaatgttatttgcattcaggttgatgacattgatccgaccggcatctagtgttccagcagtaatcttgtcagccgaaatgttagttatagccgcatcggggataaatgctttaccagaaaaaatagttgaactggcgtccatgtatatcttgtcattttgaattaaggtggtgccggctgacatgttgatttgagccataatatttccgccagttacggttcgttgccaactggtccaattatctccaattagtaatctcgtatagatttcattttcattgttgtctcgttgccaagtctgcttaatccgttttacatctggataagctaccacttgaagataagcccacgccgatgaatcaggagtattgctattaggtactgcttgaatccaatagttaccagtcgttttgtaattattagcatcaattgcagatgtaaccttttgccaggctgtttctttgcgtaaggaattcagcgacacattaaagttattagcctgctgatttatttgtgtctgcagaccacctgttttgtcagatacttcttgacgaatggccttagctgtctgactgatttgcgattgaaggtcactgtgattacttgaaactgtcgattgaaggccttgtaatgttcggttcaactcactatattctgaataactagctgatctttgccactgagtccatgaatcactaaatttagttcgtacataccttaatgttggatcactatcagcctgccaagtttgtacaattcgaccatcattaacccgctctacttttaggtagcaccaattagttccaggtacgttaatgttatctgttgactgaataaaataatttccagtattcgtgtaatcatttgcattaattgcattattgactacttgcacattggttagatgctcaagactaccaactcggccaattacactattaaggctattagctgttgatgtggttttattgtcaacgccatttattcgatcgttaagttcggtccggacagcagaagcgctttggctaatttgcgtttgaagttgcccgtagttgccactaacagttgagcgtagaccttcaagcgactgggatagttcagcaaaagctattgtgttgtcagatggagctggagaccaaggtgtggctactgagccacgttctagtttataagatccaacactaaaatttggtttaacatttggttgagtaacaaatatctttacgtcttcggtttgattcaatgtgaaaggatatgaatatctcttccagatagtcccatagttttctgtttcaatatttacgatagctgagttgtctttttgacgctgaacaattacttgcattggcccttcagcatcacccttagcattccagctaaacgtatacgttccaggctctagatgcttcttcgccatgtattgtgtccacgcataattagtgataaagaatttattgccactgctatctttttgcaaattatctgaaagagacaatctaccatcacgatcccaattatcaccactaaaatctgctgttccagttaataaattaactccaccaccactaaacattggaatggtagtttgctgaactttttgaagaaatccatcagccgtctgcagaaagcctgaattagtaagaatattacttaatccttgccagttaccatcattgcgaatggtattgattgcatcattcttagcagagttagtccggttatccgtttcggatttggtgtagtagctactaaactgttggctagttgcattaatccgtgatgatagctcagttagactgtgttcagtgtcttctggagctggcacccaatttgatggtgtactacttttttctaccattaaattacgatattcgaatgcccctggttgtggattagtccaaattgtcggtctaactattgttgtgccttcacgaaccttgtacgtaaagcttaaataaccatgtcctccagctggaatgcttttaccgccccatgccgtattatcagttccgttaaccctgtcataaaagccgacttgaatagttccagaaccattacgaacctctgcgctaattgttaaggcatcaccaactgaccacttgctaggatccagaggccagttaggtccccaagaattatctacttttgtccaattattactagtaccgggtactaagtttcttccaccaatcttcaaattattcagccgatcggtaacgctattcatatcaacacgtaagccgttagcagtagcttcaacatcaacagtttttgcataaccatttaagtcgctagccgttaactttgcagctaaagcttgattggttagattaacgaaatttgtataagtcgaattgtcaaccttacctgcaagcaagccctgcatgtgttgagcgtcaatcttgagttggttaatatcgccattggcagtgccaagagtggtttgcaatcctttgacatcaatcttagtggtattaacatcgcctgctaaattagcataattgatgtttaaccctttaaccgtgttagacacatcagcaatatctttaccttgttgttgtgcttgtttagttaaatcagcaattgaattttgagcagagatgtatttctgcaaagcatcagcaacatcattagtcactttagttaagtcaggaacaatgttgttatcgtactggccttgcagattagttaccgaatcgtttagcttttgcaagctttcatcggcaatttttttattgtcctcaatcgatttgttgagattctcaacatcggcatcagctttttgcttgttattgataatatctgctttggcttggttaagcccttgttgagcgtccgcaacctttttctttatctcgtcatcagataaatctttacgaatccatttaccggacccatcatcctgcttttcaaatatccaaagttcggttgaattaccatttttcttaaaccacacgtcattaaacttagcattagttggtggcgcagttacacttggtggaaatacaactgtcccgtctggtaatcttctaagttgtaattccttgattgtttgagtaacgctaccttgccaagagaccatttgatcagaagaagttgtctgatcagcttttgaagttgcagaaagcccaccattaaaatcaagtgtgtaactactgtttgggacaacaaaagaattcccctgtttatcttctagtcgtagccaatcccccgcttcaacagcaggattaccaaaccaattcagactgaacgggtaaaaagttatgtctttcaattgctcccaaatatcattgagccgttgtggagtcatgatattattttcgagtttaatctgagaaccagtagcatctccagcttgataattcttggtttcttctgtactctcaccatcacgagttttagtagtaatagtgacttggcattgaataccattaatcttataggcagcttcattcttcgttagtcctgcttgttcatattgactaggatctaattcatagtttggttcagaaattgtccgaatagtaaacaatccttgtcgatcaaacagagcataaccaacatacaattgagcaatccaaccaagtgctttgcggtaactttgaccagtgatcggagctgacaaatctgcttggtgcggaagacgtgctaaatcatcagtattagccttaacacctgattgagcacagatctccgcaatgacatctaatactttagctgggtacgttagtttagatacataagttccctctaagccacagaaacgatcactagcactaacagtcgtaagattattatttcggtccatcttgatttcactggagataataaaaacgcccaacggttcataaacataaccgctagatgtttttattccaatgctaggatgaacctccattcccagcttcaatccctcaataaggtgagagaattcaatctgaactgtatttgaatacgtagacccaattgcaaacgtatcaccattgtaagctcctgaatcgtacttcaaactattaatatcagttgcaccatatgttttaccatcaatcgtaactttaatatccaaagttcgctgtgaagctcgccaagcatctcgagtttcttttgattgtgttaacactaattaatcacctccttattgctcaatcagatcaaaagataaacctttccaaactggtaaagatcctacaaatgaataaacgggcgctgtccgatcaccaacataaaacgtccccgatcgaacttgcccgtctactggatctaaatactcaacattaaagaattcagccttaacagaatctaaaatctttgcgcactctgctactgttaaagcaccaaaagttaatgttatttttcttttagttgcaactcgatcacgatgtaaaagtccttgcgcatcacgggtcgcctttgcatcaatatcttgaatagcaacctgcattgtttgtggggcaggattaaccactgtcccagaaatttttagagaatacaagcatccatctcctccttaaatatttaacatatttcgaccattcttttgatttaccgcgttaattcctttgatagcatgttcgccaaatgactcatcaccaatcttaacggttaagtgtaagtcaactggttgattactgttgttagtagtattttgcatttgtaatgcttgaacgatggcatttactaggtcggtactcatttctttgaatccgccgttttgcattgttgcatcattatttgatgaagattcagcatacatagaatttgaagtaattgcattatttgagagaactgttggaagttgtaaccctccgccaaaattccgattcataaatgcaatcgcttcgttaatccgttgcatacctaattcacgattcattagtgggataaccatttcaggcttatcaccttcaccaatttcatagaagccgtgcttagaaattaagccaccatcttcataaccgtgtccgtgaccaataactgccaacattgaagaaccgtaacgatgcttagcgtaattaatagcggcaagcatgttatcgtaacccttcatgatgttgtgatgaccagggaaagcataagcattaaatgttcctggctttgtttgtaaaagaccagttgcgtttccgtcagctaaaccatcgttaccaccaatagcacgttcgttaccgcctgattcagtttgaatttggcgaacccaagcatttacataatcagcactggcaggtaagccgttcttgcgcaatgctttcttaacagcactacgccaaccttccgcacctggtccggtttgatgagttgcaccaccgaattggtcaatcaccttccgtgcccagttcatcatgccttttttctcttcgttaactgcacctttggcgagttttagtggtacctcgcctgctccccaatcataggtcacaaacttatcgacaatatagttaacgagtttttcgggatgggcaatgtcatctgtaacgttttcgagttcatccattgcagcatcaaagaatccaccaataccgctaaaaaggccgccaaagtttaaactgctaagtgctcgactaattccactaaagtcaaaattaaagctaccaatcccaccagcatatttaggaaccatgtttgctaattcgttagcggtatcagttgcagttttgaccttagtaccagccggcagataagttaagaaattacgtttagcagggaatagtccttgctcaccattagggagttcataactttctcggtaaatatcaccatcttggtcattaactaatgctaatccacctggatgattttgtgtccctgttttgtaggcgttccagttaaagtaaccccaaccaacagaaccaccgccaagcttccctaatacccagttaattccttcgcggattttatcggttgctttttgaacaggtctaaccattgcatcaacaacacgactaatagcattcctaatgctttgcaaaccactagtaataccattaccaatagtgctacctagtcctccagcccaagaacctaacgtccttgaagtgccgtctctaaaacttgaaacccaacttcctaaacgctcaccagcatttttagcagcgttataggcaccactaataccattgcctacgtgaccgcctaaattaccagcccaattatgaatgctactattggcatcattaaagaaacttctggtccattcagataatttattaccagcattaacagaacctgagcgtgaagattcagagccgttattaatatggtcacctaagcgttcagcccattggcgtacaagaccactagcagattctctaaagtctgttgtccaagatttgagtttctcaccagcatttttggccattgattgaccattttcaacactgtcgttgatgttagagccaatttgtgatgaccaactatggaccttttccttggcattaccaatgaaatctgttgtccagtccttgatcttactaccagcctgcttggcaaatttcttacccttttccacatccgtattgatatttgaaccaatcttttgcgcccaggatttaatatttttcttggcatcagcaacgaatccagtagtccaagatttaagcttattgctaccagcaattgcaagcttcttactcttttctacatctttattaaagttggttccgataccagaagcccactttttcaaggtcttcttagtgccatcaataaatccggttgtccacttaccaagatttgaactagctttttgaacatctttcttacctttagtgatattcgtattgatgtctttaccaacagacttagcccatgatgtaaagttatctaagatttcatgggacttaaagccaatcgcttcaacccagtctttaggttttttacctttgccatacttagaccaaccatcgctaaacttagcagcaccagtaccgccccatttaccgataaatgagcctatttgttgtccaatcgcagcacctaatggtccgccaaagaataagccgataccaccaccaatggcaccaccaattcctgaaccgaagctcttgaacttaatttctttgttctttgctttgatacctttgtaaatatcaattccagaagttacagcaatcatagcggttgatagaccgatacctaatttttgcccgagcttcatcggttcgccagctttaatagaagacttagccgatttaagaaagtcagttttagcgaggttagtattttgccacttcttgttaacttcgttccataaatctttaagcttaccgacaccggtcttaaaattatcaaacttaattttagctagttcttgaattttagtaattgggtgtttactaaaatcaatcaccgttcccagtaagtcatcagcatacttagcaccattcttaagcttatcaaaactaagcattgtaactattttaagggtatcggtaaagtccttaatacttgaaatagttttacctgcaactttaagactgaacagtgtcattaaagtagtagtcattactttaactgctgtttggtgatgatcgatccaatcagataagaggtttaatgcacctgttagtaatttcaatgcaccaacaatggcaaaacctgtaatctttgctaacggtttaaggaaaccattaaagaaccattcaaaaattggttcagcagctttaatcacactgtgaacaaccttcaatgcagctgctaatagattgaagaagtctggaagtagtttagtaatagtaaatccggctagaggtaacaggacattcttgtaggcccatgccaaaccgtcccaaacatctttagtaactggacgaatagcttttagcaaagtgtcaattgattgcaacagcggtgtaaagtcaagcttcttagcccaattggcagtgtaagttgccatatcaccaagagcacctaacatatcatcaaccatacctaagagcgtcttaaagattgatgttccaacatcaccatgtttccaagccttgtcgaattggtccgctaaattgccaattgtattaccaatgcctgtaacaatttcaataagatggctccagattgaaacacctaattttgagtgattccatgcttcatcaatggatccaaccatatccttaaaaattctaagtatattattaagcgcattaagccaagcttgccatagtcttgtaccgttattgccgtgttgccatgcttcatcaaaggctttagcaatatcaccaatgaatttaactaggttagtagccaaatctaagagattagcaaaaatccttttaccaagatcaccagtattccatgcttcacggaatgattcagctatgtgatggatagcaacaagaatattattcagtgaatcaaagatagtctgaataaaccttgttcctcgtccaccttcttcccatgcttcggcaaatgccctcgcaatgtcgccaataatattcagcatatctgctagcagttgaagcaagttctccattactttttgcccggtaccgttgtcccagacatgtaagaatgaattccctacatcacctaataagcgtttaatttctttccatgaatacttagcggcgtcaacaactgcttgacctttttcatcccaggcttttttcattggatcaaagatttcacctaaaacctttttaaccttattagctgcatcaatcgcattttgagaagcctctaacgggacattccagtcaaggcctggatcgccttcatcacctgctccaccatcatcaataccaggatcatcaaagactggtgtatcttgcttttgctgtggagtaaacttctctagtggttgagcttcaaaggtgccattatcttggttattcttgttattatcaagaacattaagttcatcaaagcccatcaaagaagcttggaggtcttcgtttgccttcttagtatcttcaaaagctttcttcgcttgctcattagaagctttaatccgttcgttttcagcagcaacagcagcagcaccttgacgattagcttctgcaatctgctgattagctcgttgcacagccttagcttgttcttgctgttgtttcttaactgcatcgttggctttgcttgccgccttagaagtatcgttcatcgcccgtacttgactatataagccctgagcaccacttctagcaccagacaggctcattccagttaaagcagaagtaaactgagcaagccaaccagttgcttttttaagagcattcatcaacgagttaatagctggcaaaacaaagctataaattggataaaaagcagttaacaagttgaccttaattgcgttaaagctgcttgcaaactgcttattagtcattaatgctgaacccataccttgagctaacatcatgattccttgatacaacaatgtaaatacgattaactgactagctaacatactcattgccatctttacgccttttaatcgctcacttagcattgaagcacttgtaccagccttgcgcattgaagaactaccactatcacccatgcgcctaaatgacgaggtgacgtttgaaatagtatttcgtaaccgattaagccttgaacttatatttgatgcggtgttaccttcttgagctagtgtagtgttcactcttgaagatgcgtttcgtaattcatctccacgagaactaacgtaactataagccttagctaattcattgcttcgatttataagacgtttatactctgtttcggcttctttgagtcctttattattaccagatgatctaccaagaacagcatcttgtgctttggtttccgcaatagtacgcctaatccgttcaatctttgcttccgtttgatccatctcacgttcaatacgcttgagtgaatttggaatagtattaagctcttgcgacatttcttgtgcaagggctttggcttgattctgataacgttccatcttgacttgtgcattagcaatctggtcatcaagtcgcattgctctaacctgactgccttgtttgttcatatcaaggttatctctgctagccatcaatgttgctattctacgttgcattgattgcgcctgttgcattttctcgttgatgtgggatacaagcccatcaatttcctttttagctcgggaaacttccgcttgaatttcatcatcaattcctaaatcaaccggccttttaggcatatagctctgaattcttttttcttggtagtcatcgaagcttgagttttttattcttggtctaggcttttctttaggacgtacttcttgttgagcttgtttaacaggaatatcacctacagtttcacgagctaccttagtttgttgagcaattcgttgttgcatgttagatgcttcttgtaaacgagcagtcaaactatccaggcttttttctgattcgttaacggcttctttggaactttcggcttgagccttgtttccttcgataatcctattagttgcatcattctgcacactagccgtacgctcaatagatttttgcttagagttttcagcctcttcacgttgacgaacttcttctttggctttctcatttgctttagaagcgttatcgttcatattttgctgaatacgatccaagttactttgaattttagcttgcatatcgttagtcttttgaccgatgagactagtcaactcatccattttctggagtacatctccataattagcccgaaaccttaactcaagttcttccaagtccattactattcacctcctcctttatctttattaaattgtctaatccgttgagcttgttgcataagaatagcttgatctcttttccaatcgggttctttttcagacatttgctctatctggttcatatcatccttaacaaacggataagcttcttctaacttaggcatcttagcaggatcattaaccgcaaatgctaccaattcacttaaacggtgatccatatatgctttggcacgtaaatcatttaattctcgcttcctgttagcggcaatttgcgtcatgatttccgcaaagtctaaatcccagaaatgatcagcgtctattcctgattcaacagcgattgggtaaagatctttgaataaatctgatactgtatcgtaatttttttcgtttacagcaactgatcttgggtcgcttccactggatctaatgtcacttcgcccgattccgaattggtcttcgatgacttcttctttttgccgaaaaaaccagacgcttcaaatagttccattaaggcattaaagagatccatcgtggtattaccatcatctaagtacttttcaaaggcgttcaatactcgtttatcagttacgccatgattttgattagcgccttgtaatacgatcaggatttcattaactggaggtagcttatttccaccttgagagtccataaataaggacaacatagacttgccaagtcgccgttcaatcttaaatacctcacgaccgccaagctttaagtcaagttccaaatcacctaattgcattgtctttgttgctttcttaacagtagttgtcatatgaataaattctcctttaatttttatttgtcactaaagataaacgtgggaatcgaacccacgtttattaataaactagccttttggtgtatcactacctggtgcagcagtgaagtgtggaccatcagatacagtaatagtaattgtgtaacctaatgccccgttaactgcaaccgctgcaaacttgatgttgtatgaaccacgcattgtagcagtcattccatctgggtaagtaactttccattggtattgtttccgatcaccggcttgttttagggctttagcaaaactagcacctttatatacagcttggaactgaacgttagaagcattttgaatcccttcaacttgcttccgccggtcatcagccaaagtagtgacatcaaccttttcagtgtcaccacctaattcgggaatagtcttgatatctgcaatttcttcccacgttgatccatcttctgaacgttcaagcttggtaccagtaccaaccagaccttctgaactatcgatagcaaaacgttgtaggtctaactttaatgcgtcactatataattttacattcttcataatttcatcctttctggtatacacgtttacttgtgttatctacaattcctgtaaagacaagtacaacacgtgttattccattcaaatcttgatcaccaatgttattagaaaagcccattgccgaaaacttagcaatgagcttattttttatttgcgttaaagaacctttatcattgtacaaatcaattgttatcttccattctgtatcagtctcttcttggtaggcattacgtatataagaagactgagttgttgaatagatagcaattggaaatgccgtgaatttatcaggataagacggcgagacaatctttaattctggaatagacttcaacgtcttatataccagtgctttaacattgtagatttccatttaaccacctaatttatcacgaagctcttggtcaactgatttctttataatcccaggtgcttccttagctattctgttagcagaaggtgtcataaattgtcttgctggttggccgttggttcgataaaaatacttgtccttaatcttaacctttggaattccatagatttttgtaaggtcaatatcaacttcctcagctggaatgtaccagggagtttggcgataaacaattgccacattaggtggaagctgcttactagattgttcaccaaccttaccagtaccaaactcacggaaaatagcgatcattgacgaattccaccaacgaccaactatttcatccccatcgacttttacttcatgcttaaagctacgggcaagttcaccagtagaatatttgatactagattgcaactcttggactgcataggcttcggcttgttcaattgctgtctcttggccgttaacagttgcatctgctacaacttgaggaagttttcgtagcttagtttttaactcattgagccccacaatctcacattcaatcattttgctcatccctcttgatacgttctaaagtaacgtttttatgagtagaaaactcttgaatagccgtaatcttataatcaggatcactagaactcggaacttttaggcaaataccaaagccttcgccgtgcccttctgaaagtaaattgccttgatacttacatgtcttaatatatttaatatcttttccataaatttgcgcattgaccgtaccaccagctgattgaacattcatcctgattggttgtggatcaccccagccagaaatgctatagccttcatcatcttgagtattcattggttctttaagataaacggttgtaagatcactttcttttaatctcatagcttcgtcaccttagcaattcgatagcggtttaatccttgtcgaatatcttttggaataccagtctcgagataattagttactccaccttccgagcgttgtgtttcgccttcaagtcccagtcggttgtagttaatgactgccaactttttaacatacacactcatgttaccaactaattctttttgacccgtataatctagcacctgagcatttgcttcttctactagctccttaattaattcatcatccgtaacttttaaacgagcacttacggatggaaccatttcggccacttgatccacattcagcacctccaattaattaaaggactttagcttggtatacattatcagcactagcaaatgatggaagcatggttgccgctgctaatacccaagttccaattggatcttcaccagattcataaatcttagccataacattaccaacttctgatacttgcgcattagttgagatcaaacggttttcttctggagttgggccatagatcttttcacctggcacttcatcattaaagagaacgatccgatcttccgggaagtatgtttgtgttttaactttacccttagcgtcttcctcacgatacttaccagcatatgcacgaataaccggaagtccttgagcaaccatgaattgatctaaatcagcttgaccaacaacccgaccggtatctttaccaaagattgcttccttgatttcagtactacgcattaatgtccgtaataccttcttagaggtcaatgcacgtgttggggtaatgtcgagcttatcagaccaatcttgtaagttttcaatgattgaagcactaccgctatcccaagtagtattacttgctaatgcagtttgatgctcttttggaacttgataatcaatggaaatcccgttgtccttatcagtaatcttaccagtagcaaacatttccattgtcatcttttcgccacgtgctttcaccgcttgaaccattgcatcaatatcattaaatacatattgctttaagtagttagcttcggcattattacgtggataacgtaacttgattaacatttcttcggtaatttgcatcttgcgctttacatatgctaattcagcagtcatcttacttgcttcacgactaccgatttcggcttcggcatcaaaggctgaatagctagcaattgttggaacacgactaccagcttttaagatatcgacttcgagtgttggaaccttagttgctggaaataaagtatcacctaacatatctggatattgacgattacgagtataatcaagcaccgtattctgatcgaacatatcaagaattggtgtggcaaaacgttgtaaatctagcttaagtgtttgcttattcatctattatctcctcctcactacgcttttggatctgctgtggtagtatctaaatccttaaagtgaattgctgtcattgctttaattgcatctgctgatggagttggagttaatcgttgacttaatacccaaccttcacgcataacagctaccatttgattagaaccatcttctgatacatatacatcattaacagtaataccaaccgcctttgcatcattcgttggatatactgtcccagcaggtacatacttgcgtcctaagtcatcagtttggacattgtaattgtccttgttaattgtttcagggaaagcagtgaacttctcagaagcaaggaagtttaattgcttaccgttttgaaatcgtgtgtacattaattttcattctcctttcttatttccaaaaatcactttcagatttattagcactattagccttttcggcataaagctcaccggccgatttatgagtcaaatcatcatccgtactcttaggtgttcgtgagccttgtgctaatcgagtttcaacggcatcatgaacggcgctacgaaatacttcgcttacccgttcatacgtttcattcatattgtcttcgttagctagaacatcatcaaaaacatcaactaacccagttggcaaaccatcatcaactaaacgagaagcaagcttacttcgattctcacgcttagtaacatcagcttcacgagcagataaagcttcttcccgttgcttgaagtcatcctcacgtcgttcttcttcggtcatgttcttgcgatccttagctttctttgccttatcgctttgttccttttcccagttagccttagcagtccctaatgccttgtctaacttcttatcaaaataagaatccaattctgactgggtctggaacgtcatgaaaggcttattttgcgtatcagaatcatcattagtatccgttgcttcgtttcctgtatcagcacctccttctccatcttgtccttcatctgcaaaccgctgtaagttcagctttagcaaattgctataaaactttactttttccatagatataatcctttctacccatgcacactcgaatttatgactgcacgaaaaaagccactccatatttctacacagtgacttctaaaagtgtgtcttcaagcccacacacgtattcaattattgaagtagtttcatgacgtgcttaggtcaagatttattgttacctagatagattacaggcacagttcgacaaaacggatgcaaaggtggcacattcttaccaataactgcatcagatacgttaaaaactttattattaattgctcgacatatcttactggttcgactatcaagaacagcaattaactgatattgcttaactccccgtttcttccagctatcaagctttaccttagagtaaaaataattagcttcggttctgattaatcgactagcattgaaacgacttgtattaaactcatcttcaatttgcttaatcatttctcgttcagacattccacttaactctttagctgtaaacaattcttgcaagcgttcagcaagcttatcagtgttatcccaaatacgtgatgaaaagtttttaccttcccatctggaatttaatgctgcctccacataacgattaggtagctcagtgattttcgacttcggtacgtcttgttccatcgataccgttgcaatctgcttgtcagtcttagggttcttgataacgattttattttctttagattctaaggctggttttgttttattagagagcttgtaatcttttgctttatcatatacggctccttgcttttcgacttcggaccaggttcttttcattacatcagtatgcaatttaatattctgatccaattcaacgtctccaacatttttagcaactatatacgctttgacttgtaactcttccagtcgggtaattctgctcttagcggctaattgatttaagtaattatcaacagccttcttactttctttatcgacaatattgcttgctaacgcttgtaaggttacaagctcagatggtgagatgtgcgaagacatgatcgttgcaacttcattagcagtaatatcagcataaaaatagcgacgataaatcttttggacctcgtcgcttaaatatgcttgcgctttctggtatgccgtattaataacttttaggcgtttggttgcttcatcctggttctcttgttcatcttgcaagtctcgcaattgccaatagttgaaattgtttttatcaactttcataggctttcacctacaaaacagtgatgtattgaccatattgcttcacaagctgattaactgtattctcaaacgcgtttagcaaagttttatcttcaatgcgttcactatttgtaaatacagccgtcagagttccattctcatcatttacagccacgttagtacaattattaaccgtatgagttagcaaggtagaaaacgaagcacagacgatatcagagccttttacactatactcagcgtgtccgcttgctatgattgtcgtcttgttctgttccttttggatcttcactcgaatcatcttgactatcctccaattctaaacggtctggatcttgtcgctgtaacgcttgctggttctttttgatgttatcagcatcttgttgagccatttcatcaataacttcttgaacatccccaacttgtggaagccaactataagtaatcttgcgcggaagaataccgtcagcattcttaatgttgttaactacatcagacaggttaaccggaatgtttggtgttaacgatatatcacaaccatcaacatccgaattgccacctttaatattaacgatggtttggatcagttttaatcgccggtgcaagccatcgaagaagtaacgcttcttaattgaaataagattttcaagcccaaacagcttaaatttcattgcttcacctgacacatttcccataaacttttcatcgttcatatttggaacgtatgagatcttatgaatatcattttcgatcgattggctgagtagattaacctgtgtttcgtcgaaagttttagttagccattcaacatcagctccatcgtcacgagaaggcgcattaataacaccattctttaatgcttcaatagcatccgtatcctcttctaacacgaagccaaacgtaacaaggattgcatcgacaaaggcttctttatcagaaattcgatcagtttgcaggagattataagcatcaatcaacgagattagttgttcaaagtcaccctgtcgctcttcattatttcgatactcaattaatggaactgcattgaataagttatcgtattcgtcaacgatttgatcatctatcgatacttccattcctacttcagtgcgatattctacaatcttttttggcatgtataccgtgacactataaccatcagtctgtccacttaaattcttctttgcttgaacaaacacgccaaataaaggttcatgttcaaccgtatcatcagtaacaacaattgcggcacgtggatcaacggcttctactcgtaattcagtgttaggagtaatcttttcattgccaagctcatcaatgctaatagttggagcaattgttttaagataaagcaactcatagccatacccaaacacagataagtctttttcaagctcaatatcgtgcttatgaatatcaatcttttctagtgcttctaacacatcatcaatattcttacctttcttggcggtatatttaaccggattcccagtcataaaaccaacattcatatcagtgatgtacttagcatgattaatcataacgttagaagctttaactttagcattctcaaagcgatggttattaacttcttgatttccgttgtaataatcagcaagtttatctagcctgctttgtcgttctttcagtttacggatagcataattaatcgcttcaagatttggcttattaacatcctcaagtaattctctatcaattgcaacagccacataaacaccttctttctataaaccacgaacacgtggacgtttggtaatctttgcagtgaatcctttatggataaccatgtaaacgaaataacgcatagcatcgcaagcgtgatcatgttctttcactggtttatcttcaccacgttcggctgctttttcatcccatacatagctggataattctttaaataaattaggacattgattgctaaatagtatcttgccttcattcattgccgtttgggtaacacgaataccatctaccacatcattttttgccttttgcactcggaaaccattattccgtaacacagcaataaaagaagccgcagacgggtcaatgataatctttgcgtgaatgttcccaagaaacttcttaagctcctgacaatactgctcatctgtcttttggtgagcagtcgcacgtcctgaataataatattctttaactaagtaccaaacaccatgattgcgtccccacaacagaaatactgttgggttctgcgtaccgtaatcacaagacacataatacttttcaaaatgattaggcaattcattaactaccatcgtatctcgatcgaagttgtcatagatgaccccttctgacattacccacaagcctaaaatatagcgttgataaaacacgccagaatacattcggttataacgatcaatggtttcttgtgccaatgatggattgtcctgcatcataaaatgaagtcgtaacgctcgcttatctttcatttggtcaatccattcaagtttgaaccagtggtaaggtccttcggggttacagttaaaccacatcttagaacccgttaccgaacaacgagccgttgcctgattaacaaaactttgcggcataagtgcaacttcatcaaaaaagaaccccgccaaagtaataccttgaactaggtcctgtgatgcttcatctttaccgccaaaaatgaagtaataatttgtatgaccattcttgctgatcgttagcatattatccgaacgtgaatcgtgaatggcatacccttcactttctagcatgcttcttaatggtcttagcacgttacgcctaaatgaaccaattgttttaccagccattccaaactgctgaccattgaattgggtcatggaccatagcacgtatgataatgacatgacaactgtcttaccagcacgaacagaaccatcacagataatagcttcataaccctttaattcatcattagcccaccagctaagcgcttgaagttgtttccgactaaacggggtaaacttgaatctaactgtctttatccccatctttatcactccatatcttcttcataccattgctaagggcagcaagtaatgagttggtgctttcatcattaacttctggttctggcaagcgatcaagtaagatctgcattgccttctgacgatcttccatttcaacaactggctcacctttatcaattcgaatactcttgatgttcgatgtatcaatcttgctactatcttttaactcaacaatattcgtatagtaataagcctgttcgcctgtttcaggatcaatcttcggcacatagcggaaattacctccgccgtcttcataaggtccatttttatcgcgtaccttataataagccaaatgcttttctgttctgaacgatagaacgtcagtaacattgctagtcgcttgatttaagtaacgtagcaagatgtcattggcggtcgcatatagttcttgcgattgctgtttctttaactcagtaaggtaagattttatccgagcatttccgagcaatctaggaccgttagtcgttgctacattgtaacttccaccataagctttttgataagcccaagtagcgttgtatcgttgcaagtaatacagacaaaaggctttttgcttatcattaagttcatcactatctggcaattctggaggcggtaacgacggtgcaaccttttcttgttttgtacgcgtactttttacttttgtatgcatacttttcttcttggttgcattgtttcgttgccatttattcctggtcttccatgacttaactgtactaagtgcaacgccatacttcttggcaatgtccttatatttcatcccagctaagtaatccgccttagcttcttccatcttactcatggcatatcaccacaccacctttctaaatttgtgtacaaaaaaagcacctgcaaattgcagatgctaataatgagggcgcccggagttgcaccaggatcttgccacattggcacgttttcctttataaactacttccctcgtctataaaactttatttaagtaatctcgtagctttattgcattttctttagataatttgaataccgtctgttgatcatcttgttcccgtgttccttgacgcatattagggtaataaagattagttaataaaacatcaatactatctggttgctttaagaagctgatctcagcctccattcccagatgatcgtcaatcttatctttatacattgcattaaaccaaccatcatcaatgatcaacgaatgatcttttacattcttaaatgattttctatgcattctttacctctcataattgattcagctactcttatcacctaactcacagagaagctagttgatagatatataccacatggcgccatcgcgctaatcgttattctgtttccgtggatccttagtaccagtgattgcttccattccctcggtagtaactatccattgctttccaaactttcttatagaaccatttggaaatttatctgggttctgctgataagttctccttacatagttttcagcatggccccagattatggacgcttctttagcatccataatatctggagtgttcaagtttatcctagccatacgcgtacagccccatagacaacccatgccactacaccagtaatcaaagcaagtttaatacttttacgatactttttttcttgtttactcatgataaaatagaatatagcaaagcgggcgaggctctcacctcaaccctttgttatcgtttatttaaggaaatgcttaacgactattttaattgtttctgcaatcggataagcaggcactgcccatgcagctattgccgcccactttgtagcttcaactttgtcgttctgcttttcctttttctttttatgttttgccatattcctatcctcctttcacttattataatagtactatatcgtacgtaagtcaagtgaattagagggaaaactcatttatttttatgtactttaaaagccggcaagcgttgacctgtcggctttttctttgctaatcgtttcctagtgcgttcagcatgagctaacatatgcaattcagcaccgctgttggtaaagccccaattcttagttgttctcatatgttaattcctttaaccattcaatagcgtcttgggatagtttcagatgatgaccgtattcaccatcatctgaaaacgtaacgagtttgccagtcatcatatgttttaaatcgccagcattcagttcagtgggttctccaccaccccaaagattatattcttctggcacatcttcccagcgcttgcaatttagcctagttacctctgtcacttccaactcctcctatcaatctatcaaaacaaaaaagcacccattgctgagtgcttgtatcaaggctatggaagaaacacgagtaagtaggtgcttcctcctttcgttgattgttgttaaaagtagatgagccttgaatgctgatggacggaatcgaaccgccttctccacgttgaaacggaaacaactgtggtgctttaccattaagctacgtcagcataatacagaaatgcttgcatccactaatcgtttttgaattttgttactcattgcatctctgcattaaatcacggcttagacaaaaaagactatgcaattacgaaagaggagcgttcatctcctatcatagttaaatttgccgtgataaagccgagaggtggattcaaaccacacttttgccacacgatcaagtgtgcccatcttggttctcagcaagcagtgcgacccgttaacactgcaattacgaatatcgggaactgcccccgcaagtattgggccactccaggatacttggcatctagtttgcatattcgcataatcaggaccacgtaatcaccgcacccggtcgtagttttccgcctactcctgtaacggtattgctgtccattcatacggtaatcctttagccgctgagttagattacatactcttctgctgattacagcacggttgctacgagactatcagagtagcatgtaaatttaatgataaaggagatcttccaatcttccaaaacgcacaaaccaaatttaatcgttaccgtaaatttcttttgaagttaatgatagtctcaatgtggattatggtcatctgccaccatcgcgtcggcttgtttaccggattccacacttcctacgcttaacaagagagatcccgttgcgagtatcgttaaacgttggaaacacgcatagcagtttcaggattgcttaggcacatatttaaacggagcgtgcaaagttttattagctaactttgcgacgataacataatataacgttatatctcccgttgtattcccgtttttgtcctcttttcatcccatttttgtcccgttttcttcctgttttttgctcgcaagtcaggaataatatcagaatcaacattaagccgttcacataccgcttctaaacaatccgcaaattctaagcaagcataatcatcagctcgatagtaagtagaattgccgaatttgttaattcgctctttaattactgaaagagataaaccttgaatatatctatacttgataatttgttggctagggtgtcggtaactactgctgcatcctgcaatcgcatagtcaaccgctcgttttgccaacgtgtattcagcatattcgatcatgcttttttctgaaccattgccacgtcttgatcctcgaatacctgtaatatcattctgtggcgatttaataccccaatcacccgatctacgtctaatagttgggtacttatcttcgtctaaaaagaaattctgtacgttcgcaattgttgctttcttattatccccttttaatagttccactatttgcacgctccccttgtgatataatagttatgctttaaatttatatctatggaggcgttctcatagtgagggcgtcttttttttacgctttttaacgcaatttaacgctttttaatgctatccaaagaaagaaaagacagcataccaaatactgaataccatgtatagcactccgcctagacctaacaatgcaatgccagcaactataagcccgataaatccaattactgtatatcccgcaaaattacgtattactcttcccatcttttccctccaaattcacttctattctttaatcttgttatttgcgtctttcaaaatgtcagatattttttcttgccttaaaactgcttctacatctgtaattctcaattgtccgtaatagcctgtattacgaaataacactcctacgtgacgataatattcaggttttgataaccctgtaatctttagaatagtagactgtttagtgccaatttttcgcaagatataagcttgtgcaaaagggttattaatattgtgcttataaaaatattgcttaattcgccattcggcttctttaattcttctaggttctcgcaacttcaaacccttacgaaacttcataatttcttgaagtcgccaatcatcaggagcaaggatctcttctggcatttcattaactccaccccattcatgattaacagttaatgaatccattgctttagatagtcttttaggtattgccatcttcatttacctcctctacctcgatttctaccctaggatggtcactgtaatacttttcagcaactatctttacaatctggttgtcatcttcccatagcaggccgtttaagccatccaaagtagatttgatgtaattatccgtgtccggttttacaatcggtctgtgtattcctgcgatccgcaattcgcgttcttttttcgatatgcttgattgaatgtgtcggtaaaatttaagactaacaattagcgggcctgttaaaggctcttttttgtattgaaattggcacatcatcgccaattgttttttgtataccgacactttctttggatcatacaagcgtattcccttacccattcgagttgctctaggccgtgcttgttctacaggttcaatttcaaaggtaagtttcactaatctaccctctcgtaagttcgttcaaatatatcttgatcgatagcccaatgctctccatctatgccagtagcgacgtaatcacctttgtgaactcgcatcggtccttctttagtatctaagtaaccagtcccaccgtcttcaggaaaccaaggctctccgcaatcaagcctcataggatcccagctcagtgctagttggtaatgttctgcttcggcacgagttaatacctgttcagcctcaattaaggctgtctttctgtatttgtgtagcattattcttcctccatcctgtgagtttcccagtcataactaaccattgtttcaactttgaattttttatcacatccaatgcaagagatttcatgctcaccatcttcatacaattcgggatattcaattaaatcatcatcactaattgcagcaccacaataaggacaaactacataatcactgctaaaagtatccggttccccttcttcaatgctttctctaattttcgctaagttgcgaagttttaagcaatcattgcaatatccgccatttacccaggctaatttgtcatactttccacacatcttgcagtgatgatcttgataatctagcgtcattattcttcctcctcatgttcactctcacgattaaatttagccaattctaattctgtaatgaatggtttcccgttatattgggcttccacagaacgcttaaaaaattcaacagctttgtgttctggatataagaatttaagcttatccatgattgccatcgctctaagtttttgctctaagctccccgctttgttaaacgacttcgacagtagatcagcaaaccgtagtaaatcatggagttgtttattgctaatccagtaaggttgatccgcttgtttacggccgaattgctcagtaagaattgtttctagctttttcagataagcatcattttctaagctttcataaagatattcacctaatgctttcttttcttcgttcatcatttcttccacctcttaggctttctagctttgctgtgccaccattgtgaccattcgtagctggtgtgatcgtgccaagccatcatgtgcttggccttagcaatctgtcgcttacgagtgcgtttgattggtttaattctcttgcacttatggaaagctgcatgaagatctttacggagtttgggtgtcattatcataactgctttaatcttcattagatactcaccatcccttcaaataatacataagcctgtcacgttcataatcagttgctattattcttccgttttcaatctgtgaaatttctacagtactaattcctgatacaactgataaatgtttagcagtccatccttttttcaggcgagttgatctcaacaagtcaccaacatttgtatggactctaggtttttttctcctaattgtattgtcgcaaacccgacaatgcatatttttctcaaaacgcgccaatctccctatccaaaactcatgaccacaatccaaacttttaatcttaagtggtttatttgcattttgatatgcggaaacaattatgaagtttggggaaagcttatttttagcgattttaaatccacgttctcgaagggagtttatattccgtttacgagcacaataggggcaaccatctcctctataaatgctgtaaggtcgttgcatatatatattgccgcaagcaagatgtttaacctgtgtttttaccgaagaccctttatactcaccaacctcgtattcaggaccaagtatttttaatgcacgtctttcaaattcttcttgagttatatgttttcctctgtaaagatcgctatattgcaaaaccatcaacccattcggaaatgttataaatttcttgtagttcagcagtgtggggcattttgataacttcactaaatgctaaaaagtcacttgtatcattacgaataaaataaacatcctttgccttcctgcttaaagaatcacactggattgctactccattcatccccctaattgccatattgaataacaagaaaggaattgctctatctgacatttcttctacttgataccaataagctctagggtcataagtaaagattgacaagaattttaagttaggatcagcgtgtaatggattaccaacccgatcatttatacagtcatcccaccagcgcttgattaaaattccacctgtccctgcagctacctcgaaatagtggccgttagatttatcgctatcaactaagctattaagcaaggtcgcaatgctatcaggggtaaaatcctgcttcttgcttttccgttcagcttgctcatcttcaaaatattcatggaaccagtcaaactttaggtccgttgaaacttctaggaacttcttaaagacttctggacgtttttgatcattaagcattagctgcagcattctttccggagctttatatgactcatcaactcctaacagtttattaactgtcttagtatcaaattgcattatttcacctcaaattccggccatcacagtcataatcttgttgtcatcctcttgggctagttcatcaagaagatggatatatactcgttgcgttgtttcagtatcaccatgtccaaggcgcttagctactgattgaatagacacacgattagcaattaatatcgatgcatgagtatgacgcaagccatgaactgtaacccgatgaacccctgcttcccaacacattctttctaacttagtattaaacgtactattaaaaattcgaggttcaccgtaaacaggagatggcttgctaatcgacgcataccaagtcggccatattggttcatccggttctagcccttccatatgtttttgtagatccatcaaagtcttgtaatcaattttgatcatcctaaccgaatacttatttttcgttggcataaattttccatactcatcactgccatattttttggacttgtagttgaaagtcttattgatataaatagtcatattatccatatcaacatctttaggtgtaatgccaagtgcttctgcaaaacgggtaccagttcgtaagctaaagtcaaagaagtcaccccaaccaatctgatcctttttgaagaccttttctagtttccttacttcgtccatttctaagtatttaggacctttattatcgggttgaaccatcgaagttattttaattttatgatttggatttttacccgtgatccatccttcgtaaacggcatcgtcaatcgccgcagcaatatggtggtaaaagtcaagaaccgttgctttttgatgagtctgaccataaacattaattaacatctgtagatcttcacgcgtcatatcacccaaaattaggtctggtgctaactttttcaaccacttcaaaactagcttatatttagctgtcgttactcctctaactgaattaactttgtaggtcatataccattgctcgtaatatttccaaaatttaattaagcgtttcttaccagtctttgccatagtttccctccgccttataaaaatcgaggatagcttgattaatttcaggcaccttcattgcatcaatcgatggtgcaagagatggttcacgttttttaatttgatttaattctttctcactaaaaattcttgcttctttttcatcttcagataaatcaaaaacaagttcatcaaatccagtgatgatatttgatacatactttggatgaaaagatgtctctcgtttagctactaatcgatacttcttttctggaaaacgttcattaactggtgtatcaagcagccgctggataacgtccatggcacgtgctaggtcttctggtgcaacttcagttaagccaccccaatgttttaaaaccgtatcccagttaatcgccttagtattcaattttaagaaccaattatcgcttatcatgtcttttgaaaaaacgttcaaatagtcgccatccacttttgctctaactgtcatagttgaattaataacgtttactgcttcatcaattttcattgtgctacctcctcaatttccttgctctcacgatctttaacaggcgttgcgatgtactgatcaatcaaatcagcaatcttatcccgcagctcatcgtttagatcaaaaatcacctttgacgcttcttcggtagtaatatcccaaaactcaggatcaagccattcttcgggccagccctcaaagttatcgccaaacggttgagcgatactctttgcctttggatcaattgtcataaaccaccggcaatctttgtcatcgtctcggtattcttcccgatccgcgtaaatgtcgataccataaatatcgctacggatagcgaacactttaggcaactgattaatccgctcaattaggtcatcggttgttaaatactcttctgcattcatgctgtctttgcctcctcgtaattccaattggtgcaggctttgtcacgtagcaaacggcactcgtgacaccaattagctgcatctttaacgttttgctttgtaatcggtgcttttaaggcctgtttcatttgatttcctgtaagcggcatggtgtagttgctatcatgttcgtctaactgtgacagataataaatcgctatctgtagcttggttttaacgaatttgattgcccgtgcctcaacattatggctatcccattcatcttgggttatctgcaccatacgcttagcaacagcccacttagcccgtacttcatccttagtcatgtgttactgcacctcgctctcatctggtagttgatccatccaattaccttgatcagacttgccctgtttctcctgctcttgttcacgtttaaaccactcaggcataggttcgttaattggcgcacgtttgccatacctttgtctttgattattagccgtgctagggttggcatttaagtacccatcaatctttgatgagcgaaagagcgtttctggtttcaagtaattgtcacctaattcgccgtttctaaacgttaccccgtgccacaatgagtacatgttatcgattacctttttcatctcatcgactgtgtagtcttctttgagtcgaggttcaataattcgcttattaccatcagcatcaggcttgaagtgcttgccagtttttttgattgagatattcaacaacttctcgccgctgtgcagcaatggaaggttgggctggctgtgcctgccctttatctcttgtagtagtcttttgtgtagtctcttggtagtctattggtattggttgggtagattcttcctctccgattgggcagtttttaccgtctccattgggtagattcttcccattcgttgggtagtttctacccaatcgttgttccaaatgggaaaatgcgtcatagtcaattcgataccactttgttttgtcaaaagataatttattatagttgcctgtaataattagtcctcgtttttctaatttcttaaagtggttcgatagagcctttctagaaagccaagggaactgtttattccaatcagccatgctgttatagacccatttgtgattgtctcttactgtattagaacgttgaagccaatagtgaagctgctggagaataacagcttcgtctaagcttttcaacgctccagctaacgatgcctgaacttgtaacggtctttcatcaagtaatagtttgctcatagttaccgttaactcctatcttttttaagtcttttttgcttaatttaattcctacggttgtaaggtgatacttcttacagaactctgtaatacctatcttgtggaattctgtatggtgaactctgcataacgccattgcacggtgtttagtgtgatctgtcttattgcggttgttacccataccaacggtatctatatggtgaaaatctgcatgctgtccacaaatcaaacactgtttatgcattaagcattcatactgaaaatgttcttcatttcttggcaagagttcatatcctttcttaactggtacttgattgtcaaaaataaaatcaattacataatcaattaatcgtttagcgtcactcatgctattagatgagccatcttttaagctgatttcttcaccgtcattcttgatccagtaaagattgtggaaatattcatcaattatttctttgctctctccagaccagttaataatgtcacctagcaacgcatagtaaaaatggcgttgtaactcgcttatttcacgtttatcaacaaaagtgaccattgcaggtacgccttgaactttaccgtcattgatattggctacatgttcccagttgacttcttccaagtattcggaaattccgaaacgcttaccgttcttttcttgaacataaacctttgctggaatcttcattgatggcatttatatcagtccttagaagggcaattggtcattatcaatatcaattggagcgccgttaccgtcattaaatggctgtttattatttgcttggctagcagtgccaaagccgttgttagtttgattactgttattttgagggcgtttttgtccgtttggctggcttccgtccgcttgtaacatacggtaacgtgttactactaaataggtattaccgttgtaatcactcttttgccattcagtttcaacggctaacttttgattagccattttttgcacaaaatcaggaattgagtaaataggttcgttatcttggtatccagctgcaattaatggagtattaaatcgcttaactgataaatcatgattttcttgtgtattattagtccaaacaagtcgatcaaagatatgtttgcccttttgtgttccatctaaaacaatgtaatccattgaagccattgggttaccattctttgagttgccggcttttgattgtgcagaaacataaatgttatagattcccgcttcatcaggtacctgtgagccgaatgtgttgttgtggttagtgacaaataatggttgttggttattcataattaagcagctccttcttcttttgcttgttcttcttgtttagattcaattaattcttctgcatgaaatttcttacgatcatcaattctgttctttccgtgattaccgctttctgggtcgcaatcaatccaacgttggttgtcttggacgtatagccgtccgacaaaatcaaacacgctagtaaacgcgttaaacgtcttttcattcatatcagccccgtaacgtcctgctcctgttaatccaccagtaccgttatcaatttggtgtgcagtagcgtagatagttacattgctctctcgtagcatagtggctaattgtctgaaccaaatttgtaacttctgataattttgtcgattatcttttgaagcattgtcgatgttttctaacaccaagttttgtaatgaagtgacgttgtctaatgcgattgcttgatattcgccactcttaatggctcgttgtaagaagcccaccgttaactgctgaatgttagcgaagtcgtcttcttcaacgaccataaagtcagtatctttttgattacgcagtggattggttgacttatcaaaactgaaaagaagtttttttcctttgaattgtttgaataagcttgtcttgcctgttccgccatcgccatagataaaatacatattaggaacttctggaattgctccggctttatagaacttcataacttaccacctaccgatccaatcgaatgacacattgcttcttgccaccctttacaccagataatccctcaataatttctcccgtttcattaagtatgacttttccatcatctgtaatcgtggtagctcccttgatctttgctttgtcaagttcagtgactgttttgagtaaatcactaggtaactgcttcattgccttcctttgtgcaacagcacctccccacttccaactatcactggtcgttcttgcttgaacgttacccattgatgtagatacagacgtttgaccatgctcggtgtcaataaatccaagcaattctgtcatcaagattgcattatcgtcttccgccctttttattttgctttcgtaaaagtttttaacttcatcaatttctgccttttcagaagcctttgcttcttcaattaatttcttgtttttcttgtactgccgtaaacgctgattaattgcaacagctttatcagcttcaaattccacttgattattcatggattagcttcttcctttctgctaaatggtatgcttcggtttcaacttcttttgcgtcttgcttaaaatcgctctgattatctagatcgtctaacagatacatcattgctcgtgctatgtcataatcataagcaccatcgcttaaaatcagattcacgttatagaggttacgtgctaaaactttttgcattcttttaagtcgttgtttataaaattcgttcatatgctataatctccttagatataatttttcatatgctatctatttgccatcggtgttcccagcaccggtggctttttttgtgttcaaatcccatagcattagcagatagaagaacagtaagaacactgctccgccatagtcaccaacgcctgcgcaataggtgatccaagcacccattagcattgctaagagctttgaattaactatttttgttagtgtcatttgattacctcctctcgttgttgcttaatgaactcaaatattttccttgctgtcggcacctgatcagctgtaatctggcgaacatctttaaggccgagcacgtatttaattggacggtaaatagcatcttgaattgtcatatagccaatgccgtctttcttaactcgtaccttaatgaattcttggatttccttactaagtttccgccaatccgggctaatcttaggttcattatccttcttgcttaattcataaaccttcaatgcaattgcgttcatttcttcttctgtcattgccattagttcttgttctcctctgctgttaacttctgatatttacgatcaaattctcgactatatttaatacaagcgttagtcacaacagtattaacacttgatccgttgtattccgctattttgttaagcttattggctacccattcgggaagtcgtactgatcgtctaactctctccatgttatccctcccgacatattttatgtgtctataatagggtgacacttttaatgtgtcaatacttttttaagcctaattggtataattttggtgtcaggaggtggtaccgtgagttccacaacaattaccattcgtctccctttagagttatcagataagctcgattacgtatctgaaaatattggaatgactaaatcaaatttaataagagttgcaattttaaaatatctagatgtaaaacagcttgatgaatttgaagaaataaaagcatcgtcagaaagtaataagcgaatcaatttatcattaactgagttactttattcaatagttaagaagcgatctgataacttaggcgtaactgtaaacagccttatcatttatgcttcggaaaaaattcaaaaacattattcatacatgcttgaatcattagaccagtaacgctaataccggttaatttactgattcttaataagtcatcatcgacttgttttggcaaacgtactgttatatatttcatatttcctccatactctcctttgaagggaggtgagtttatgactgataaagaaattgctttggaattgaccaagatctacgttgaacacttaaataaacaaatggacaataagcatcaacatactgatcttgacttcaaagcctttgggaacgtatattcaaacctttatcaactagttcatttaattgataattctgatgaaggtaagtaattgatattaatatttacttcattagccgaaagagttgctacttcatctagcagctcttttatttcattcaagttagtgcaagtggttgaaatatctagtgttagttgttccatttttgtttacctcctctgaaaacatctaagctaacgtctaatgcgtcagcaatcttacacatgtttttgaacggtggttccttcccatcgtttttgtagttataaattgttgttagtggtatgcctgtcattttagataggcgataaactgttatcttctgtttgtctaactgaatttgtatgctattccacaacatcttgtataaatcaactctttctatatccatatgtagtgttataatcaaaattacgattatttacataacactccttttagtaaattaatcgtcaattcaatcaaagtgaggtgtaattaatgttctttagtcttcgcaaatcatctgatggacaatattatttcgttatcaaatcagataatcaggaagtagttgctactagcgagacctacattctcaaagaatcagctaaacataccatcaacgcaattaagaatggtattaattccgatactccagtatttgatattactgattgctaattattcgtttgatcttattggctagagttagattttttgcagcttgttcttcaagctggcaagtaatcttctctagctcttttttattttcttcatccataaatcgttacctcctaatgtttctttctgtacttttctttcagcacattcagtttctcaccctcaataacgttgacgattgctccgattaagaagcaagccataatcgccaacacacaccatgctagatacgccatttaatcacctctcaacgcttttacatatgggctttcatgatcttcgtagtatctttctgatcgaaatgtttcaaacttttgatattccttcaaatcaacgcgaccaccggcaagaaatacctttcgccagtctggatagttttcttgcgcccaaactttgcgtctatcaaaagtcgactttgacataggtacttctatttccttgtcgcctatctttttaattgacttccaaacattacagaattctagcctgttcatctggtataaatatgggctcatctaatcacctcctctcttttgctatacttagttcatcccctacgaaaggaggtaactactatcactactcattacagttatgaggaagctcttgaagacgttgcacgcattacgaattacatccctccagaagcacgtaaagcaatgcagctagcttcgcaagctaaccaacaaattacagaagcacttgcccctattcagggacagctttcccaacttcaagaactgctcgcttttacttcgaactttgatattaaaattgcctcgactctcaatagaatcaacaatgaaattattcactacccagttgaatcatttgttaaacttgcggataccgtcgatgatcttcccgaatctaacttcgatcattccaatcacgaaagcaggaagtttacccgaaatagttattccggttgcaatgatactgaagcagacagcacacgatataacgtcaagctttttataaaaaaacaaatcgatcagttcaaaaagaataattccatagaagagataaaagtcccagatgtcgattactgcttcaaatttttcaagcttctttttcatacaataaataccctctgtatcatttacggtgtctataacgacacttttacttatgtgctcatagaagcgatcataacgaatatcgacgacatccttgatttcagggataagtaatcgtctgtcactagatgtctaccgtcttctgcaaaagaccgtagacattctttttttgtcttgggtatctccttacatatccagcacacggtagatcttcttacgaatctcgatcgctttcggtgagttatcacccttaattgctcgattaacttgttgacgattaatgtttagcaaacgtgataactcagcttgtgtcatatcacgatcaagaagtttcattttgatgtttcgctccacgtcagctgttgctttttcaagctcattttctactggcatatcctattcctcctctcttgaaatgtttatcaacttgttgcttgtttctatcactcgtgataaaatcagcttaaaacaaaaaccgttattttacggcatttatggcttttgtttatgttacttaacttgttgacaatcttattatcaatcattcgtgataaattgtcaactgttttttaatcattcgtgataaaaatagtcaaaagaaggtttgattgatatgaaaactgtagacagaattaagaaattatcgaaaaagagaggatggtcactgcaaaaagtagcagaagaagccggtataggaatcaatagtatatatcgttggaactcaaaaactcccagtacacaatctttaaataaagttgctaaggtcctaggagtatctgcagactacttgcttggtgaaactgagaaaaagaaaacagccgatctcgcagataaagatactgtctttacgttcgaagggagggaaattccgcctgaggatttagaatatatgaagcgtttattgcgtggtgatgataaatgatatatcaacaagcagaagaagcatacgattatcttttagaaaaagctgcagaatatcatattgatgttaaatggaaacacttttctccttatactccacctgggagtagttacgaatatcgacgtgtagtaatgaaccttaattggcatcggccgaaagaaattatttttcagtttgcacatgaattagctcacgttattcatggcgatcatggagacgttgtatattatcacgcgtcttttactggtaaagagtcagttgaatataaggcaaatgttggtgctgttgaattactagtccctttttactgtcaagaagtagatagagaatgcgctaatagcgcaaactttatggaagtattcgatgttcccaattatttaacagacgtggttaataagcaaattcatgattactatgtagtttaatgccacgtccaaaaactgatcgacgttaaaagctgaattttatttatattaggaggaatatcacgttggcaaagaaaattagggatgcagaggggaatgtttataaagaagttattgccccagacaagaacaggaaaagaactctcgaaattgttgttggagtaattgcaatgattctttctgttctatttattggtggtagctttggagctgcggctgtagcggatgcttttggtggtgagggttattacaccgccagaatgatgctaggacttattcttgcaatcatttcttttgttttagtatttttcataaacaaaaatcaaaaagttattggttggtcaatcaccattatgggcgcaatcattctgtttatgtgcggtgactatggaattattccgggcattgtctacataattgatggcattttagcattagttagaaaataatttaggaagactcgttacatggctaaaaagattacagataaagatggaaaaacttatgtgcaagtaaaaccatggtacaagcgctggttgatttgggtaattgttgtaattgtcgctttatttttaatcggttcattaactggcaacagtgaaagtaaaagtagctctggatcaggaagtaatactcaaacaacatctccttctagaattactgttgattatgacgattataaagttcagtcttcaaaaacatataaactaaattacagcaatactgattgggataaagctgatgtaaaaatcaataaagttactgtatataaactttccaagccttatgaattcgattcagctagcgatggtaaatatgacattaacggttttattaaattagatatgactattaaagcaaatggtgatatttcaatttatccgcaacaaggtactgccgttattggaagtgaacaagaagatgctgttggtgaatcatgggatggtgatataaacgacggcgtagaaaaatctggagaagtttatattcctatcaaagaccttgatagcccttcaagcatttcagatattagatttaagtttagcgctaacgatcaagatatggatagcgatcatgattacgacttaacattgaatctagataacaattaatatatcttatcaccggcatttgccggatacataatgaccaaaatctgatgtcataaaaaatgaactataaaggagtaagatattatgagatctcgtttacgttacacttcaaaatggatgcaaatatatttggtggtttactttttcgcaatgattgctaacgtacttgttcaacattatttccgtcaatcattatttgctgatatttgtaattattttatcattcctgtttctagcacatttaccttttttgtattgtccttaatggtaaaagaaactgattctctaaataataaagcagataaaatgtccaagcacgactaagaaactagttataaaataaaaagccccctccgaagaaaggactacatcttaggatcagggctgttgagagcttgttcaaggagaaacttgaaatcatcatcatcatttgttaatgcttggtttctagcattctctagcgtaatattcctctgtccaagtattaatacagtttgtaagttcaacttctgccagtaagttaaagagctaagaaaggaatctattggtgaaatgttttgagatttaaaaagcatgactattttcctccaagtttaaaacatatttgtactttctggggaacaataataactataattatagcattatgggctatttcattcttctccaattggaataagttatttttatatttactgctagtagtagttgtattgttatcaattaatttaatttacaattttcatcttgagtatgaaaattttcaacagttaaatgacagttacattgagttaaaagatgaaaataaaaagttaaaagaacgtattgagaaccctaaaccgtcttcctcagattctagactaaattctttagaacatcaaatagctgaactaaataagaaagtttcatctatcgagcaaacaaatgatacctcatcgatgaaattaaaagacaacattacgagatctagtaaaaagaggacaaagtcaacaactatcagaagtaattataatttttctagtacttatatcgtcgataaggacggattagttcattttattaaaggagacaataagaatgacaactagcccaactataaacttcctagcagtaaatactaataaaaataaaaataaaatattaatgagtattactagtgattttctgcccatccaacaaataatccccttaaatgtaggtttgatatatttaaaacctaatacccaatataaaggtaatcttcaaatcaaatgtgatgataaaacaataattaatgatgatagtttactcttcccggaacaagaattgtcttcaagtaacgaaataattaatggccttgtaggagcaacatttaatataaatactcctgttataaatttagcggaaggcgcatacgctctaacactaacactaaaatcagccgatgataaagaacttagtaaaagatcaacatattttttcgctaaacatgagtaattaaatattttgtttagaaggatgtgaacatgaattgattgactccacaacaatcaatcaattcaaacattgatgtcattaaaagacgtgattattagggagtaatttatgaagaaaataggtcttatttgtactgctattattgcatgcatagttctttcaggctgcaataacttagcatcacaagaaatgcacaaaaaaagcgctgaatcatccagcgtgaaaaaacatcatactcatgacgaagatcaagatgatgacttttcattaaatcttgtaagttcagatgatcaagatactgattcgaatgatttagatattaatgttccatcagctaacacttcaactagttcagcatcaaatatccaagtaccccactttaattctaacggtactggttcccctacttctggtggtgatccaaaagttcaagctgaaaccgcaagcatacaacatgattggaacgttaagcaaggcatcgaaaaccctgatggaagcgaaacacaaaatttcaagaattgggtatctaagcgtgaccaagcagaagcaaatgggcaaagcatgccagaatatgatcaaaatcaacgatattaaacgggggaagattaatgaatactgaaagcaataagaaagaaccacaattttggaaaggtgatccttctggtggttttgcgaccggattagtcgccggattcatcatcgggctaatcaatatttgttcattcaatattccttggttgggaagaatctgtttcatagcaatttggctcgtcatgggtacacaaccccgatttaaggacacacgtacaccagaagaaattgctaaagataaagaagaacgagaacaaaagtttgaggaaataagagaacaagctaaagcaagagaagctgaacgtcaagcaaccaaagaacaaaaacgtgaagcaaaaatgcaaaagaatgagctgaaacttcaaaagaaccaacttaagattcagaaacatcaacttaaaaaccgcaataaaataaaatgccccaagtgtagaagtacaaacgtacaacctctcggagttcataagaaaggattttcagttggcaaggccgttggtggcaccattttggttggtggagttggatcacttgctggatttgctggcaaaagctcaaagaaaacagactttgtatgcatgaattgtggaaaacaatttaagaaataaaatcttgtccaaccaaattgatgacattaaaagctatttaatattcaagttttaaaccggtcgaaatcgaccggtttaaaaagcactataaaagaacatatgtacgggaaggactgtttattatgaataaaaatgaactgctggaatatatagatactaactccaccgccattactatcttcaaggataaggtacgtacagaacaagaagccaaaaataaaaagcgccaacctgctaaacgctggaatgacgctaaaatcgaacgcactgtagataaatttactgatgatttcatcagtaatgtttacgacaagttatataaaggggtgaaagccaatagaaatacaccaagaaataaatggattgagtttatcgaaactaacgaaatccttgatagtttagaagaatcagtaagtatgatggagattggagaagattaattatgtggatgcaagaacgcaatggaaaattccgcttctttgagcaatataaagatcctctaactaataagactaaaatcatcagtattacaatgaaagatcataaaaagagtactgctaagcaagctcaaattattctagataatcgcatatccaaagctttatcaaaagtcggtatcggaaaaataattcatggaattacactcaaacagttacttgatgaatatactgaatatgaaaagccacgaattaggagatcaacgtattatagccatcaaacaatggttaatactttactagatatttttggcaacgatgccttagttgaaaaatttaccccgcttatcattactgaaaaactagaaagtctaatgtatggggatagagagttgtccagtggctatgtatcacgatataagtactatctgcataagttatttgattatgcagtaaaacactcatatacaaaagataacccggttgataacgttaaaattgattataaggcccctgctaatggccaacaaattaaagacaagttcctcgaagctgatgaactgaaagccgtcctcaactatctatataacaatactcggatctacggagaactttgcgaatggttatatctcaccgggctacgttttggcgaagcagccgctttaagttttgatgatgtttaccaaaaggacaaccattggtttgtagatataaccggtacattagagtataaacgaattaaaatcaaagaacaaaaaaagagtgacgcacctaaaacatcatcctcagtccgtagtgttgtactaccaaagaaagccgttcaaatttatcttgatctgaagaaaaaatctaatggcaaaggttttatcttcgcaactgaaaatggcacaccgattcaaactgcctcagtaaatactgttttaagatcagcaaagaagaaacttaaacttaataaaccactaagtactcatgtatttagacatactcatatttcaaaaatggctgagttaggaattccgctatatgtaatccaacaacgagttggtcactccagtagtaagattacctcccagatatatcttcatgtgacacaaaaagcaattgaaaaggaagcgtcaaaacttgatgaactgtaaaaaacctaccaaaaacctaccatttactttaaaaaattatttttactctttcttttttcttaaaaaagaattttaaaacaaaaaagaacccttgatacacaagggttctgcactactagttgtcgcgacgacgttcagcgatacgagtagccttaccagtacgttcacgtaagtagtaaagcttagcacgacgtacacgaccgtaacgaagaacatcaatcttgtcaacacgtggtgagtgaactgggaaagtacgttcaacacctacaccgttactgatcttacgtacagtgtaagtagcactgataccagcaccgtggcgcttgataacaacaccttcgaacatctggatacgttcacgtgaaccttcaacaatccgagcgtgaacacgaatagtatcaccggcacggaattctggaatatcatcccgtaattgactagcagtaatcttttcgattaacttgttttgacgcataatatatttctttcctttcgccgacattcatgtcctgtatgacgggcagcggaataccgttattcacagctaaacagccaataactactatacattgttttcagctgtctttcaagggtaaattagtggttttctttattaatgattgaatgacgaattccatagataaagtaaattaacaaaccgatcacgaaccaaccaaccattaaaatttttgcatcagtatttaggccccagaagatcacggccgaaaagatcgccgaaattgctggaagtactggatataacggcatcttgaactgagcttcaggcaaatctaccccttcccgcggacgcaaggcataaattcccagagaaacaaagataaatgcgaccagggttcccgcagaaacaagggttgctaagaacgtaaatgggaaaacagaacccaagatcatagccaagaaagtaatcatccataatgcgtgattagggacgtgcttatcatcgatttggccgagtgattttggtagtaacccatcccgtccaaaagcataaattagtcgagaggaagctaaaaggattgcgattaacgcagagaaaataccaacaatcgctacaacggaaagcaagttcgccgtaatatagtgtccagactgtcttaaagcccaggctgctggttctgcattatttgcataacggctatatttaaacatccccactaatacgagcgaaaccgcaataaaaaagcctgttcctagtaatagtgtcccgatcaatcctcgtggcattgtcttttgcgggttaatcgtttcagctgtattagccgcaatcgcatcaaagccgacataggcaataaagatttgtgcagtcccagctaatattccctgccagcccccaaaagtggtacctggttgatgagcagggagaaatgggacatagttttgcggatggattgcagttacgcccacaacaataaacattaaaattactaataactttacactaacaataatattttcaatccggctaacctgatggacaccgcgggaaattaaaactccaacaattagaattgcaaaggcggccagaatatcaatataagaccctgtatgtggatcaaaaccaccagttaaggcatgcggtaatttaatcccaaaactcccaagaaatccttgcatataggctgaccacccagacgcaacaaaagcgactgaaataaaatactcagctaaaagggcccagccagcaatccaaccaaagaattcaccaaacaaaacattgatccaggaaaaagcggaaccagcaaaaggcaggactgaggacgtttctgcataggctaatgccgataatcctgcgccaattgcagctacaatgaaggctaatggaactgcaggaccagtatgctcagctgccacaatccctggcaaagtaaagatagccgttcccactaccatcccagttcctaatccaattaagtctcttgttcgcaaactaggggttaattgtgcatccttttcttcataaacgcgggggttctgcttaagaaataatcgtttaattaattttttcattcgggtcaccttagtctggaacagttggatcttcatccagcttaatatcttctaacattaattgctgttcccgacttagcttagcagtttttaaaagatctggtcggcggtgaagagtccgtcgtagcgattcacgcatccgccattctttaattttctgatgattaccactcgtaagaacttccggtactttcatcccccgaaaatctgctggacgtgtatattgaggatattctagtaaaccgttactaaatgaatctcccattggtgaagacatgttgccgaggacaccaggaacaaagcggacagtcgcatcaatcatcaccatcgctgctaattccccgcctgttaacacatagtcgccaagagacgcttcatcggtaactaaattacggattcgttcatcatatccctcataatgaccgcagataaatgttaagtggtcttcctgggctaactctttggcataggcttgatcaaactttcgaccagcgggatccattaaaataacccgtccctttgaatactgatctttagtttgttcatgaattgcatccatagcgtcaaaaattggttgcgcttgaaggagcatccccgctcccccaccaaatggcgcatcgtcaacatggttatgcttatcggtagtatattgacgaaaatcggtcacattaatatcgataaatccattatcttgcgccttaccgataatggattcccccattgttgcttgaaacatattggggaataagcttaaaatatcaatcctcattattcaagtccttccattaattcgactgttacaagatttttatcaaggtcaacgtttttaacaacatcatcaatcactggtaataataactctcttttttctggacgttcaacaacccacacatcattcgcaccaggagataaaatttccttaattttccccagatgacgaccatctgttgtttcaacgtctaatccaataatctggtggtagtaatattgaccatcgtctaatggctgttgatcatcagcactgaccattaattcatgatcacggaattgttcaacaccattaatattatcgtagccgacaaacttaacaagaacaaatcccttatgttgccgcgtactttcaatcgtcaatggtaaaggctcacctgattgttgtaggtacaaggtatttcccttggcaaatcgttcatcaataaaatcagtagttgctaatacgcgcacttctccgcgaacaccatgagtatttacaattttaccaacattataatattccataaattcctcctgaaaagacaaaaactcccacagattagtgtgggagttttaaatttagtgacgatggtcattaattaataaccggactcgcttagagttagcccgtcgagattgagtaccctcgactattgttcgcaatgctgcggcaacgtgtccctgtcgaccaattagacggccaacatcattgggagcaacatcaattatataacgatggtaacgtccatcatctttttgggtaactgacaatgcctgtggctgcttcaatagcggaataactaaactacgaattaacgactcaatatctgtctcagccatgactgattatcactacttcttagcgtactttgcttcgtggtacttcttcataacgccagctgcttgaagcatgttacgaacagtatctgaaggttgagcacccttttgtaaccattccataacagcgtcttcatcaaacttgacttccttaggagtagtcaatgggttgtaagtacctactgaagtaataaaacgaccatcacgtggggcacgtgagtcagctacaacgatccggtagaatggacgcttctttgaacccatgcgctttaaacgaattttaacagacattctttgcacctccctgatttcttttaacagataataatataccagtgttcaaatagaatgtaaagtattttttcttgacaggcttaaattttttgaaattattttttctttcgtaatttacgaagctttttaatgcgtttttgcttgtcttttttcattttgcgcgccatgcggttcattgccatttgtcccatcttgccacctggcatttgtccaccaaacatattttgcattccattgaaattaccgtttgtaacctgcttcatcatcttacgcatttgattaaattgcttaatcatccggttaacttcaacaattggccgtcccgcaccagctgctaaacgacgacgacgactaggattcattagatcagggttttcacgttcttctggcgtcattgaaagaacaatggcccggatatgagcaaattgcttaggatccaaattaagattcttcaaggcaggattattagccatccctggcatcatcttaataatattttccaatggtcccatcttggtaacctgatccatttgtgccaagaaatcattgtagtcaaatgtgttttcacgcattttatccattgtttcttgagcttgctcttcatcaaaattcttctgggctttttcaattagggtcatcatgtcccccatacccagaatccgtgaagccatccggtcagggtgaaagacatcaagatcctccatcttttccccttcaccgacaaacttaatcggcttacctgtgactgcccggattgacatggcggccccaccacgggtatcaccatctaacttggttaaaacaaccccagtaatgttaagcttatcatcgaagccttgagctgtatttactgcgttttgaccagtcatcgaatcaataacaagcaaaatttcatttggatttactagttctttaatgtttgcaagctcatccattaattgttcatcaatctgaagccgaccagcagtatcaataatgacataatcattatgatttttcttggctacttccatcccttcgcgaacaatttccaccgggtcaacatctgtccccttttcaaaaacaggaacatcgatctggtcagcaacttgttgtaactgagtaatagcggcgggacggtaaacgtcggcagcaataaacattggccgcgcatgattttcattctttaatcgtaatgccaatttaccggcagtggtcgtcttacctgccccttgaagaccaaccatcatgataacagttggaatgtgcggtgctttgttaagaggaactgcttcttcccccatcagttttgtcaattcatcattaacaattttaacgatttgttgggctggatttaaccctttcagtacttccgctccggctgctttttcccgaacggtctttacaaagtcttttacaactttaaagttaacatcggcctctaaaagggcgagccgaatctcacgcatcgtttcccgaagatcagcttccgtaactttgggcttgcgtcgtaatttttccatcgccttttgcagacgatctgttaaaccttcaaatgccattttattcttcctccaagctttccagatgatttactaagtgattgagcgttgcatcgtctggatagttttctcggacgtatcgttgaattcgatccgcctgttgattacgaacttgaaattcagcatacaaatgcaatttggcctcgtaatcttctaatatgctttctgtgcgctttatattatcatatacggcttgacgactaacatggaaattctcggcaatttcgcccaatgagtagtcatccccgtaataaagctctaaataatcattttgttttttggttaataagggttggtaaaactcaaataatgaatttatccgataattcttttcaatttccatatcgtcatacctgcctagtcaacttcgactaatcccttgaacaggccataaacaaagtcgccagcatcaaacttctggaggtcatctaccttttcaccgagccccacatacttaaccggtaagtggagttcattacggatagcaaggacaattcccccacgagcagttccgtctagttttgttaaaacaatccctgttacatcggtactttccttaaatagtttagcctgattaagagcgttttgaccagttgttgcatccaagactaacaatacttcatgaggagcatctggaatttcacgagtaagaatgcgtttcatcttagctaactcattcatcaagttaaccttgttttggagccgaccagcagtatcaacgaacaagatatcatagttttcatcttttgcccgttttactgcatcaaagacgacagccgctggatcaccgttttctggtccggtaacgatgtcaacaccatcacgttttgcccatacatctaattgctcagtggcccccgcccggaacgtatcagcagccgctagaagaactttcttaccttgcttcttaaagagggcggccatcttaccaattgttgttgtctttccggctccattaacaccgacaaacataataacagttggtccttcttttgccatggttaagtcaggattttcgtcttgaccagctttatcgtaaagttcgaccattttttcaataatgacgttggaaacatcctgcttgctcttagcgttttgcagttttacttcttctcgcaattcatcactgagcttcattgccatatcatagccgacatcagattcaattaacatatcttcaagatcatcaaagaagtcttcatcaacatgccggaaattagccaagaacttatttaaccgtgccccgaagcctgtccgggacttctcaagcccgcgatcgtatttcttaactgtttcagattcttgatcctcttctggttcaggagaaggttgttgctcctgctcctcatcaccatcattttcttcagaattatcagtctcatttgattcttcagtagctgaggaatcttctgccacttcttctttagttggcattactggttcttcaactgttttttcttcttctgcaacgggttcggtcggttcaacggctgtttcagtttcagcagaattagaagatggttcttctgcagaaatagtttcttccggagtactagacgacggtacttctttttcagaaacacttgaggccgctatctcttctgagtgacttttctcgctagtatactcttctttttcttctttaaccctgttatgaagtatttcgtgagttccatccgggttaatcttttcctcatagctatcggcaggaggaatatttaccgtttccggatgaattggtgcagaagctggtgtcgcactcgtcgtatctgctgcttcatcttcatgtgcggtttcagattgaacaactgcgcttgaactatcaggcgttttttcctcttcttttttcttatgacggcgaaaaatatcaaataatcccatacttgaagcctcctaaattagttaattgtcactctcttgtaaagtatcaacaacgtccactgataccatctttgaaactcctgattcttgcattgtaaccccgtacagtacatcagcgtccatcattgttcccttgcggtgggtaatgacgataaattgtggaccttcagtaccaaatttgctgaggtagtgtgcaaaacgttgtacattgacctcatccaaggctgcctctggttcatcaagaattgcaaatggaactgggcggacttttaaaatagcgaatagtaaggtaatcgccgttaatgctcgctccccaccggataacaatgaaagatgttgatttttctttcccggtggctgggccataatatcgactccggttgttaataagtcatgaggatcggttaagacgagtttagcatgaccaccagagaaaatttgttggaacgtctcatcaaacttttgtgaaacctgattaaaggttgtaataaaccgtttcttgacttgggcatccatctcacccatcgtctgattaagctgagctcgagaggcgagcaagtcgtcttgttgtcccttcaagaaatcgtaccgttcacgaacacgctcatattcttcaatcgctccaacattaacttgaccaagatcatccaatccccgctttaatagcttcaaccgggtcgctaaggtctcttcgtccaagtcactcatctgttggcgagcttcatcaatggtcatggaatattgctcagataatcgattaagagcttgctcaaccattgattcatacttcacgcgctcttcatttaagttattacgatcatcaagggctgcccgctgaagttcttgcagacgattataatgtgcttcggcttgtgacagcttttgctcaagttcttcaagagcaactgaattatcttccagttgcaccttagcttttgcctgctcttctttagcatcttttaaggctgtctgtgtcgatttttcacttgttgattgactagctgattgagtcgttaactcagcgattgcaaccgtgaccttttctaaactctcctcagcttctcgccgttgacggttatactcttgactttggcgttgatattgttgaagtcgttcttcggccactgcaattttttgttgcatttgtgctaattgtcgtgcctgagtcgacgcatcattctgtaattcatcgatctgggtaagaatttgcttaatctttgccacaacttgcgtcaatttctggtttactttatcagcttgttcattattttgttgaacttgtgattcgtaatcctgatgttgagtgtcttgctgtttattttgggtttctaaaatctgtacccgattagtaagcgtctcatgcttacttgagatcaactggcaattactttcttgctcatgaaacttatcttgtaaagtctgaacttgttgctgataatcagctactacttgttcgttcgctttttgcgcttgttgtagtttagcaatttcttgctctaagtttgctgcaagctgttcctgtttttttagctcttcttctagttgcttagccatttgcttttgacttaaaagtcctgttcgttgactacgggtggctcccccagtcatcgctccactagcattgatcaactgaccgtcaagagttaccacccgtaccatatgacgacctgcacgagcaatctcagtggcatgatcaaggttgtcagcaataaccgttgttcctagtaagtggtcagcaataatctgaaacttttgatcaaacttaataagttctgttgctcgacccaaaaagccagggagaccagttagttgtggccaaatgtttaatggtcgccggtggctaagcgtatcaagcggcaaaatagttactcggccagcgcgagtcttaatcaagaagttaataattgctttggcagtagcttgccggtcaacaaccaattgctgaagctggcttcctaatactgtttcaaccgcttgcgtgtacttggcaggaacatcaaataattcactgactgctcccgccaatccaggaaattgctgccgttgccgaaggacttcttgaactccccggtaatagccgctatattcatcggccattgactgataagcgttaattcgcgacttaagcgaccgtacatctcctaatgctgcataccaatcacgttgttttgtttggtacccgtaattaagtttttcacggtgatcttgagctgcttttagtttttcactgacagtctgtaggcttcccttagtaatggctgcttcttgttggtagcggtcatattcttgattaatttctgcaagctggttcttagtagcgtcaagttcctcgacattctgacgttgaagactcatcgcctgttcatgattacgtgacaagaaagattgctgattatgaatcgttgttctttcctgcatcaagctaacttgttggttacgtaaatcctccacttgctgttttagggtcgcgatccgctcactgctactcatctttctggctgtttcaaactcagcttgctgaccattaatcaacgctttttgttcagccaattgctcgtcatttgcctgttggtttgccttaacctcttttaaacgtgcattgagttcagcctgttgggtagttaaccgccgttgctcattttcacgttgttcacgacgaacactagaaacagattgctgattctcatacttagcaattgcctctgtctgatttaagataatcgcttggagacgatctttagttgcgtttagttgttgacgcttttgcttcaaattatcaagctgttgctgatcgcggtctgcttgtccttgatagtcccttaccatcgcttctgcttgatcgagcttggcacctaatttggttaacttttcatagtactcgtcataatgacgaaccgtttgtgtccgatcaagcacatcaaattgtttcttttgttccaagtaatcttgggcaattgcactttgctcttctaaaggttcgatctgcttttctaactcactaataatgtcatttacccggttaaggttttccatcgtcgtagtaagtcgcttttcagctgtttctttattcttcttatacttggcaactcccgcaacggtttcaatgattccccgccgatcaattggtttaccgttaaaaatttcttcaatccgtccctgggaaataatggaaaaggattctcgacctaaaccagaatcaatgaataagtctgtaatgtcctttaagcggacgttttggtcattgattaagtactcactatcaccattgcggtatattttacgagtaatggtaagctcagtaaattcactagctaagtaatgatcgctattatctagcgtaatcgaaactagggctcggtttaaaggtttacgatctgatgacccattaaagataacatcagccatccgatctccccgtaaatgatgagccgactgttcgcccattacccattgaatagcttcaataatattactctttccactaccattcggaccaacaatccctgtcattccgggctcaaatttaattgttgttttttgggcaaaggatttaaagccgtccaaagttaaagacaataattgcatcagttattcctacttactatttatttttatttctcatattatcaagtgcctgttgtgctgcttgcatttcagcatgcttctttgatgagccctttccttcaccgataacgtcaccgttagcagtaacatttactttaaattcagggtcattttctgttccgctttcctccaccaaatgatattcaatggcaatgtcaccgtcacgttggagaaattcctgaagactagtcttggcatcaacagcatgatcaaaccagcccatatcaagtttaggaaagataacccgttggacaaatttttcgactgctggtcggccttgatctaaatagagggcaccaataaatgattcaaaaatatcacatagcaagcctggccgttctcttgcgccggccatttcctcaccatgacccaagcgaatatattgatcaaaatgacattccttggcaaatttagaaaaactatcttcacataccattgccgctcttaagcgagtaagttttccctgcggcaattcagggaaacgtttatatatatattctgaaacgatcagttccaacacagcatcgccaagaaattcaatccgttcgtaatattttaatccttggttaggatgttcatttacatacgaagcttgagtaaaagcttctgctaataaagcaggattatcaaaatgaatattaaattccttggccaggtagtcttgtaattctttgatcataaaaaattcctttcgtttttgacttaaaattattaaaaatgtctaaggcctattatactaaataacccgctattccgcaggtaattttaataatattcgaaaaaattaaaggctgtgaaaaaactttcgccttttctcagccccttacttttctaccttaataaaataattaaacggtttgattagttggcagtatgttctgcaatgtaatcaacaacttcaccgattgtacttaacttttcagcatcttcatcattaatttcttcgccaaacgtatcctctaattcgagaacaaattcaacaaagtcaattgaatcagcatccaaatctgtctttaagttcaaatcatcagtaatcttagcccgatcaacatcaaaatggtcagcaacaatctctgaaaccttattaaagatttctgttttcttattatcagccattattattaacctctctttactagttcgctacttattctattcgtttttcttagaattgtctagattttcggtgttatcaaaaaattcaactgttttttcaatcacacccgttttgatcatcgttctgatttgactaattgtatttttcactgctaaagcatcagcagatccatgagtcttaacaacgggggccttaagtcctaataagactgccccaccataagttgaagcactcattttttgcccgatttgatggaaaacgggctttagcataagataacctaacttagcacggagaccaccatgtaagattccatctttaattaacgtcatcatcatcttagcggttccttcagtcgctttcaaggccgcatttgccgtccacccatcacttacgacaacatctgccttgccaaacaggaggtcgccagactcaatattgccgacaaaattcaaatcgtctttgctattgaggatttgccatacttctttatgtaatttgtcacccttatcttcttctgccccattgtttaatagcgcaatccgaggattcgcaactcccaatacattttcggcatagaatttaccaaggtaagcatattgttccaaatttttctctttactttcagcatttgcaccagtatcgaggtagacaaaattatgtcgactagcacccggcttggcaattggcaaaatactagtgagtcccggacggtcaattcctttaatacggccaacaatgaagaggccggccgccaaaattgccccagtgtttcccgcagaaaagaaggcatcagcttttccttctttaactgctgttgccgcgcgaacaattgacgaatctttttttcgtcgaatcgcccggactggttcttcacccattgaaatctcttcactggtagcaacaatattaagccgctcattattttttattaagggtttaaccttgtctggatttccataaaggtcaaattctaggtcggggtaaaggtctcgggcctcttctaccccttcaatgattacttggggagcattatctccacccattgcatcaacagcaattttcataaaatttcctcctcatattagtcaaagtgcgtctccagttcatgacgctttaaatataaaacaagtggctgattttcattgacctgatcccaattgggcatccctaataggttcccagcatcagcacgggcaatttgcagcattttcaaatcagcaaccggatcacccactttaaattctggcatccccgattgcttttttcctaaaatatctccagatccccgtagtttcaagtcttgttcagctatcttaaatccatcatcggtagcaaccatcgttttcatccgggcttttccttcatcagttttcggatcggcaattaagagacaataactttgtcgactgcctcgaccaacccgaccacgtaattggtgaagctgtgcaagcccaaaacgatcagcatcatatataaccattaccgttgcattaggattatcaacaccaacttcaataaccgtggttgcaactaaaacttgaagctcaccagatttaaactggcgcatcgcttcatctttttcttccgtccccattcgtccatggagtaagcccactttataagctggctcaagatcggccgatagctgattataaagatcagtcgcgttttgtacatctagagccgctgattcctcaatcaaaggactcacaacatacgcctgtgctccttgctttaattgttcacgtaagaaatggattgctgcggcatgttggttagactgcagccactttgtttgaattggttttcgaccagccggtaattggtcaattatcgaaacatccatttcaccataattagtaatcgctagtgtccgtgggataggggtcgctgtcatggctaatacatcaggatgttcgcctttttcacgaagttgctgacgctggttgaccccaaagcgatgctgttcatcagtaattaccagaccaagattagcatactcaactccatcttgaattagcgcatgggttccgacaatgaggttgacatccccccgcttcatcgccgtcaatagttcccgatgttgcttagcagtcaatgaaccagtcagaagagcaacctggacatgggttccttcaaaaattttcgctaatttctcagcatgttgtcctgccagaatttctgtcggcgccattaaagctgcttgataaccggcagtaatagctgcataaatggcaatagcagcaacaattgtctttccagaaccaacatctccctgtaacaatcgattcatctggtatggttgacgcatatcacggcaaatttcattaacaacccgtttttgggcatcagttaattcaaatgggattccgccaataaattcttttaactcgtcattatggtataaaatccgctcgccatcttcttgacggtgggcacggcgaattgcttgcagtcgtaactgaaacaggaaaaactcttcgtaagctgctgttcggcgggcggcttttgcagttgcctgagtttgtggaaagtgaatttccctaatcatttgtcgccgatccattaaccggtatcgttgacgaatcgtttctggcaaatatgttggaatgatattggcatattcctcgtaagcttgacgaataaaactttggaggacattttgccggatatgcttattcaccgcatagaccgcaccaaactcatttcgatcatcagctttttccttaagaaacttgtttcctgttacttgacggcgagatgcatcccatttccccattacagttacttgctgatttagttcgatttgctttttaatatagggctgattaaaaaaagttgcgatcaccacttcattacctacctgcattcgaaaggtaagccggttgcgccgataaccatagcggaccaagagcggttctgacactactactccttgaagagtaattttctgtttatccttggcgctttcaatgtctgtaggcgtgaaatcgttatagcgagtgggataatacgtcaacaaatcttcaatagtatctattcccagagtagctagatctgctacccgcttaggaccaactccttttaaattggcgacggaatccgttaaactccgcaaatctttcacctcttttttaacacaaccagtaaccaaaataggagtgggaataaaagtagtcctttattaacccacccctataggaattaatttaatgtgccgctattcaaccgaaatcaggtatggataaactggctgaccaccatcgtaaatctgaatatctaattcatcatctacttcttcaactgctgctttaatctcttcagcagttttttgatcaccaccagctccatataagatcgttacaatttcactatcctcgtcaagcatggctttaaccatcttaatagcggcttctttcagctccaaatcagtagtgacgattttaccatcaacaattcccatgtagtcatctttcttaatttcacgaccatcaattgttgtatcacgaacagcattagtaaccgctccactggcaaccgtatttgtattagcttccatatttgcttgattttcgtccaaagatgcttctgggttgtactcaagcaacgcactcatcgcttgggcaatcgtcttactgtggacaatttttgttggaatatcagcaacttcagcagcttgatcagcagtcataaagatgttgccgttatttggcagaacaatagcttgcttggcaccactattattaatggcatcaagaatatcttgagtgcttgggttcattgtttgaccacctgtaatgatatgggtaacacccaagctctttaataatttcgctattccttctcctgatgcgacggcaataacagctgtctggaggtcctttttagcttctgcagctgcttttgccttctcaattggcgactcactgtcagcgtcttcttcatctttttccatgatctcttcttgttgccaaaccatgttatgaatttcaattgtctgtaaatcaccgaattgttgaccccaagataaaactttaccaggatgctcggtatgaacatggacccgcacaacttgatcatcgtttagaacaagtaaactatcgcctaagtcagctaagtagttatagaaagtatcatagtcaaacttttgagtcacttgtttacccttaccaagtcgtaccaacatttgagtacagtaagtatacttgatatcttcaggattaagctttccttgaacgctttggtgatccatggcgtgaaccatctcatcaatttcagcattgtcaggtttatagtcatcacttttatctacgcggccactcaaggcttcatcaaaggcttgaagtacaaagacgagtccttgcccaccagaatctaccacgccaacttctttcaggactggcaataaatccggcgtctttttaagcgcttcttcacctgcttcataaatagtatgcataatctcaacaagatcatcagtctctttaatcttattgaggcctgcttgagctgattcacgaacaacagttaaaatggtaccttctgttggcttcatcacagccttgtaagctgtctttgcaccattagcataagcattaacaaagtcagcagtagataaaacatccatgccttctgttgcctttgcaaagccacggaaaatctgcgataaaataaccccagaatttccgcgtgctcccatcaaaaggccctttgctaacgctgcactcaggtcgccaactctcttactggtttcgttgcgttcgtacttggcaccgcttgccattgaagaagtcatgtttgtcccggtgtctccatctggaactggaaaaacatttaatgaattaataaattcagcgttcttaccaagtttatcggcggccgcctggaccattttaccgaattcaaggtttgtaatttttgttacagccaattcgaaattcctccccaatgctcgcttaatcttctagtgtccgcacaccttggacacatacattaactgaatttgccgtaataccgagcattgtttcaagattatactttacctttgcttggacactttttgatacttctgagatctttgtgccatagcctacaataatatttacgtcaacagctacaccattatcttgctgccgaacaacaacgccgcgcgcaaaattttcacgacgaagaatttggttaaccccatcacggagggggtttcggcttgccattccaacaacaccgtagttatcagtagcagccccaccaacaactgatgaaatcacatcattatcaatgtcaattgtacctgacttagttttgatttttactgccatcgtcatggcctccttataaaattaccaattgattttagaatcctatgatactaaaattcacaattaaatcaataccatcataccatagcatatttcactaaaaaagtaactgatggatatttttgcagtcgatcaatggggttaatcaattaacgtaaaaaataagccgcccaaactggacggcatcattttaattaaacccgagtcactttacctgacttcagtgtacgtgctgaaacgtataccttcttaggcttaccattaactaaaatggttaccttttgcaagttaggcttccagctacgccgacttgagttaagggcgtgagaacgcttattaccaaattgcgtccgtttaccgttgataaaatctttagccattggtgataccctcctctttgcttcataattttttcgtttacgcaaaactgcgatgtaactcacctaattaatctaccataggcatcgtaacaatgcaatagttttctttcaagtaattttccttgacagggtattttcccctcaaaaacctattttaattggtcgctacactgaattacagaaataattccactttcaaatgaaaaatgattttcttcagctgtaaattcattgcttgtccacgaaaatagaatttgactactccagttttgcagtggatatttttcgtcttttaacgtaaggcctcgaacaggagtaagattgacaaaggccaggtacttcttatgcggcaggcgagaaatagtgtaatcccctggcaagtagtaagagacaacattttgacagtcaataatcttaatcttggttaagtatggtttaaattcactctgcaacggaagaaagaggttagctaataaatgatctaagcgtcctcccgttgcaccaaaaatttcaatttcatcagcctgttcttggattgcaaatttcacgcccaattgcgtatcagtataatctttttcaggaggataagtttttatacgagtaattttaccttctaaaccttgcaattcctccccggtaacggaatcaaagtcaccaattgctaaaaccggcttaattccccaccttaataatcttaaagccccccggtcaaccccaatccatttttcatctttacgttgcaaaatcaactcggttggaaccatttcaagcggaccgccaactagtatatttactctcattttttactcctaaaaaaatggatcttcaatattcagacaaatccgaactagaagatccatttttgttttttacttaatgtgactaattacttagtagcatcttcaagagccttgattcgttcagcaggatcttcagcgttaaagacatatgaacctgcaactgctactgtagcaccggctttgtagcaatcgacaactgtcttatcgttaactccaccgtctacttcaatatcgaaattatagcccttttcttctttaattgcgtttaattgggcaatcttgtcaacggtttccggtaagaacttttgaccaccaaatccagggttaacagtcattaccaagacttggtcaaccatgtgtaatactggttcaatcatcgctactggtgtacctggattaataacaacttcggcttttacgccaccgtttttgataatttgaagagcacggtgaatgtgttgagtagcttctacttgaacaccaataatatcagcgccagcatcaatgaacattggtaaaatatgttctggactttcaaccatcaagtgcacatccaataccatgtttgtaattggacgaatagccttaacaaaacctggtccgtaagaaatacttggaacaaaggtgccatccataacatcaatgtgtaagtatggtgcaccggccttttctaccttttcaatgtccttttgtaaatttacataatctgcacttaaaattgatggtgcaactttaatcatcctgattccctcatttcttataatttggtttttgattagcaatcaattcatggaactgaagataatcatcataccgactcttcatgattataccattgtttaccgcttccttcacagcacattgtggttcttttatgtgaaggcaaccccgaaacttacaatcagctgaaattttagccatttcagggaataaatgcggcaaatcatttaccgtcatatcaaatgtttcgtacgatgaaaaacctggggtatcggctatcagagcaccgttaacatctagtaaacttacttttcttgttgtatgccgtccccgttgaagcgcttgggaaatttcaccagtcgctaattttaattggggagccaaatgattaagcaaggttgacttccctgctcctgtctgccccatcattgttacaatatttccctttaattcttccatcaaacttactaattgatcagggttaaagggctcacgggccgcataaacatggtagccaattttacgatagccctcgatcgttggtaaaagttgttggtactcatcatctgtcagtaagtcagtctttgaaaaataaattaaaggagtaacatcttgggcttctaaagcaatcaattgacgatctaaaaggttagcggaaaatgctggttctttagctgaggttacgacaactgccatatcaacattagcaacaggtggccgcaccaactgattgcgacgaggcaagatttttaataaatacccttcctgttgattttcagcactgaattcaacatgatcgccaactactggcttgatctttcgttgacgaaagtttccacgcgcccttgtccgataaatcttttcatctgcaattacatcataaaagccacttaatgattgttggattattcctattttcaaactgcacctccattatccagtaatatttgttgcactcataatcgttcgtccattgcgaacaacacggtatgcacctgtttgtccttgtttaagggtaaatggcacattaattgttgtttcctgattaattgtaatatcttgatactccattgttaaattatggttggcatctctgatatatacctgtacacggttttcacgctggccaccatttccatcgaatggaatgttaatctgaatattcgtcgtctttgtttgattaccagaattagcaatggaaaccgttaacgtatcaccatgatttaatgtcgatccggctcgcggcgtctgattaatcacatggttagtcgcgattgtttttgattttttctcttgagttgtcaattgcaaattatttttatttgcaaactgttgcacagcactaatatcttgattcttaaagtttggaatcttaattggttctttccctgcgcttacccgaaaaataattgtgttagcagcaggcttaacaatcgtaccttttttgtggttttgtctgataatctgtcccttatcgatatcatccgaatacactggttcttgatgaacttgaaatcccttgcgacgaaggttagcggctactgaagaatagtcctcaccaacataatcagccatttgcaattgcttaactcctgtactaaccgttaaattaattggggtactaacacgggtcttatggctgacgtcaggattagttgaaacaattcggtttttatcaaccgcctgactatttactcgagtaatcttaccaatccgtaagttttgctggtgcaatcgttgttctgcctttagcactgtcattccttctacatcggggatgattacttgacggatcaagaaccaccagctacagactgcaatcagcacaatcatgccaagcgttccactaacaatcccatattttttccacttttgcggtttagttgatggatcaacggttggtgaatcagttgacttctttggttggtaatcatcagcttttaggtgtttaatatctaacaccttagtttctccattatcatcttgttggatctttaaccgcggctcattagctctttgtggatcaaggacggttttcaaatcagccgccatttcatcaactgaactataccgctcagctggttcctttgctgtcgctttaatgattacgttttcgagtgcttgaggaatttctttattctgttcacgaacagaaggtatttcttcgcggaaatgcttcaaggcaattgagacagccgtttctccttcaaacggaacctttcctgttagaagttcaaacaagataattcctagtgaataaatatctgattgtttagtagcaatgcttcctcgcgcttgttccggggataggtagtgaactgaccccatcaaggtattagtctgcgttaatgagtcttgcgatacagcaaccgcaattccaaaatcagtaattttaacgtttttattttcatcaattaagatattttgtggttttaagtcccggtgaataatcccatgagcatgggcggtcgcaactgctgaaagcacctgttccataatatcaataacttgtggaagtggaatcggatagtgcttttttatatatgctttaaggtctgtcccctttacatattgcattaccatgtattgcaagccatgatcctcatcaacgtcataaattccaacaatatgaggatcatttaattgcgttgcggccattgcctcccggtgaaatcgccgtttagtacttggatcgtcccgtaagtcaagacgcaatagtttaacagaaacgtctcgatcaagaaccatatcatgtgccaagtagacattagccattccaccttcacccagtgaccgaattatccgatatcggtgaccaatttcatatccaggattcatttcctatccctcctggttactattaatcccaattaaaacggtaatattatctggtccgccggcatcatttgccatttttataagttgagcacatttctcttcaagcggtctcggcaattcaatcaccttgataatccgctccttagaaacagtcttaaacaagccatcagaacacattaacagttgatcaccttcatttaattcaaagcggtttacatcaacttgtgcatcctgtgagattccaattgcccttgtaattatattgctctggggtagctttagtgcttcatcttctgatatatctcccgtttttaccaattcattaaccaatgaatggtctactgtaatctgcgttaataggttttgatgaaggatatatcctcgactatcaccaatgttagcaaccacaaccgcatccttaaatgcaatagcggcaaccattgttgttcccatcccctgcaagcgaagattacgtttggattgcgctaagattttattattgattaattgggtttcacgagcaaaccagcggatcccttccatcgaagtctgcggaggcctttttttaaactgactccccaaagtcgcaactgtttgctctgcagcgatatctccgctacgattgccaccaattccatcagcaataaccattaattgattgcctagcttgttagtaaacacagcaacccggtcctggttttgctttcgttggtggccgatatctgtttgataagcagctttcattaatttattatattcccttcttaaggctactgacgaagaagccatcagaatcaaaatcactcggtaatatagttaaggttggtgagtgacgattatccttaacttttcgtgcagttgttgtttttactaactcaaactccggatgttcagctagaaacgcttgaacagtatcatcattttcttgctgtaaaattgtgcacgtgctgtatgtgattataccgccttttttaacttttgcggcaaccgcatttaaaattgctaactgaatcttatgtaattgcttgctatcatttagcgtttttgtataacgaatttctggcttccggcgtaaaagtccaatcccactacaaggcgcgtcaactaagaccttgtcaaaactttcatcatcaaaaagttgatcaacttcccgtgcgtcaagggcatgagcagtaactcgcttttcaacccccagtcgacgagcattcttttcaatcaatctaaccttatgttggtgaatatcaagtgcatcaacgtggccgtcttcattagtgagggcttctgctatttgaacagtctttccacccggagctgcacaagcgtccaggactttatcccctggctcaatatgcatgctttccacggctaacatggcactttcgtcttgaatagtaatttcgccatttttgaagagatcggaactgataatttcacctttagtaattactaaagcattttgcgcaacttgactttcttgatattcaattccagcagcatctaaagtttgtttgacggtcggaaggtcagttttgacgatgttaactctaattacctgatgagccggctcattaattgattgaagtactttttcagtattttcttcgccatattccctagtcagctcgttgactagccaccgtgggacactattttcgatacttaaccgcaaatcacgttcatcaatttgccgcaggtcaggtaatcctttccgcaaaatggcatgtaaaacgccagtgacaaactttcgaatacctggatttcctcgacgtttagctatttcaatactttcgtcagttaccgcccaatccggaactcgttctaaataatgatactggtaaagtgcagacaagagaagcgtctttacccaaggatcaagccgttttccctgcacaaacccatttagccaatattcgagggtaagtttatgctgcaaaacaccataaataatattagttgccaaccggcgatctttatctgccaacgggtacctttttaataactggtcaacctgcaagtttgagtatgcaccattttcgacaactccttcaagcgccactaaagctaattcacgcgcattttgcggttgaaatttagtcttcacttacaacttggcctccctctgtaatatctttatgtccattaaggtaagaagtaatatccatcgcctttttccctgctggctttaacttattaatctggtatgtcgttccatctccagcggcaattactaattgatgcttcgtgacccgcactactttccctggttcaaggtctgttttttcttctaatggggtcacatcataaatttttgtgcgtaatccatcaataatcatattaccaagaggagccggccgtaatccccgcaccttcgcatcaattaaccgtgccggaagtcggaaatcaatctgttcttgttcactagtaatgttgggagaaaagactactttatctggatcttgagcgaccggattaacatccccgctaataagtttaggcagcgtttctaacagcaagtctcttcctagcaaactaagctttttaaacatagtgccactatcatcagtgtcttcaatcggaatagacctttgtgaaataatatcgcccgcatccatcttcttaaccatgtacataatggagaccccggtttctttatcatcattaataatggaatattgaattggggcccctccacgatattttggcagtaatgaaccgtgaacattgattgctgcaattttagcagccgccaataactttgttggaaggaattgcccataagcagcagtaatcattaagtcaggctgcaaattaataattttctccatttcaggacttttgctgagtttagctggctgtaagacttcgatattatattgttcagctaattctttaactggcgattgatgaagagtacgtttccggccgatatggtggtctggctgggtaagaactgcttgaatatcgtattctggattatcaattaaactttgtaaaatcggaacagcaaactcgggtgttcccataaaaacgactgatgttgacattaataacatcctttctttcacataaaatactgtggatctggatcgatacttacttggacatccttaaaaccgcgactttgcgtatcctgaagaatatcaaacaatagctgatgcaagtaaggatccttcttatatttgatgacaatttggtaatagtaacgacgcttcatccgggcaattgctcgcggagtggggccaagaataaccgtcgaagataataatccctgctttaggcgaccatagatatctgccattgcccgagctgctttggcttcttcgggatgactggccatcaaacgaacggtgtaatagtatggcggataacttgcttgtcttcgtagcatcatttcctggttaaaaaatttttcgtaatcgtgcattttggcatcttgaatagcgtaatgatcagggttatatgtctggataataacttccccctgcttatttgcccgaccagcccgaccgctaacttgacttagcaaatcaaaagtccgttcactagcacgaaaatctggtaagcctagaccagtatcagcatttaaaacccctactaaggtaacattagggaaatcaagcccttttgcaatcatctgggttcctaataaaatatccgcttggtattgaccgaactgtcgcaataattttgcatgcattcccttccgccgtgtggtatcaacatccatgcgaataatccgggcctggggtaataattgatgcaattcttgctcaaccttctctgttccagtcccataatagcgaatctgatgactatggcaattgggacattcacgggggattggttcttcatgaccacaataatgacatttcattgtccgcgtatccatatggagcgtcaaagaaatatcacaattaggacattttaaaacatttccacaatcacgacacatcataaaggatgaaaatccccgtcgatttagcattaaaatactttgctcgttcttttgcaggcggttatttaattcggttaatagtttttgagaaaagttactctccccgtactttttaatttcatctcgcatatcaaccacttcgattggtggcagttcctgtttatttacccggtgaggaagacgcaacaagtgataaacgttttttactgctcgcgcacgactctccagactaggagtagcagagccaagaactacaggcgcttgattatattttccccgccatttagctacttcacgcgcctgataacggggtgattcatcttgtttataactagattcatgttcttcatcaagaatgattagccctaaattagttaacggagcaaagactgctgaacgggcacccacaactacttgcgcttctccacgttcaatccgtcgccattcatcatatcgttcaccattcgataaactactatgtaaaacagcaaccttagagccaaatcgtcgccgcacacggttaacaatctggggcgttaatgaaatctcaggtacaagcattaatgctgtctttccctgttgaagagcattagcaatcgattgcaagtatacttctgtcttgccactccccgtaactccttgtaagaggaaaactttagggtcatgattgtcgattgcttgattaatctggttaacagcattttgttgatcggcgttgagctgcaggggggctgctaaatgagcatcatcaggagtgccctgcatagccaagggttgtcgatatacttcaactggtgttttttctagccatcccttctgttgtccctgattgaaggtggctgcttttaaaccagttttatgttcagcatccttttgcttaacaacttgactaccaattgattgtaaatatgaaagaagacggttttgagcatgagcattagcatgaagggatgcgcgctcatcttccagttgttcaaaattaagcaaagagcgaataccagtcaccgttttagctttggctcgatcctccacttggtattcaatcgttatctttccttccttttgcagtttgaacaatttacttaagattgccggtttatcttgtaccgccgccatttctaattcatctcgcccatgaaaaatgtcaaaggcaacatactcgtctacttcatctacaattcgaataattctggtagtcttagccttcaataagttaggcaacatcgtatataagcaagaaatccaaaaagagtaagtagtatcagctaaccatttgctaagattcattaattcaggattaattaccggttgaagatccattatcgcctgaattggtttgagttctccctcatattgggatgcattgtcaagggcaacaacaaatccttgaacagtacgttttccctttccaaaaggcacaatcactcttactccaacttgaatttgtttttcaagttttggcggaatctgataagtatatggttgatttgtttgcattgttggaacatcaacaactacctgtgccaactctggcatttaatcacctgactttaattttgcactaattaattcaataatctcgtttgcaattttagctttagattggcgggctaatttaattggcgtttgatctttttgtaagatggtcacttgattctggtcactgccaaatgctcccatatctcccgccacactatttgcaataatcatatccgcatttttgctagcaagtttacgattagcattttctagaagatcatttgtttctgccgcaaacccaacgatgtattgaccgttttgcttcatcttcgcaatattctttaaaatatcaatagtttcagtaagcgcaatggtaagatgcgggttaccatcttttttcttaattttatgatcaactatctcaactggacgatagtcagcaactgcggccgccatgattaaaatgtctgcctgcgcaaaacgttcttttaaactggtatataaatcttcagttgtgattccgcgcacaacttcaatcgctggtgattgtggaagggggacggtaacttgaccggcaatcaatgttaccttagctcctgcttggaccgcggcgttagcaagtgcaatccccattttaccagaggaccgattaccaataaaacgaacaggatcaatattttcacgtgttccaccagcagtaacaatcacgtgtttgccctttaatgcttgactgctagctaaaaaatcttctatatattggcaaattgctgctggttctggcaaacgcccgtgaccagcatatccttcagctaatcttccactaactggcggcataatattgaccccatcttgtttaagttgagtaatgtttcgttgagttgcgggggccaaccacatatggctattcattgccggaactacaattttaggagcattagttgctaataaggtggtagaaacagcatcatcagccagtcccattgccattttagcgattatatctgctgatgctggtaccactattgctagttctgaccaatcagctaactcaatatgaggaataggcgttgaatgctcatcccataggtcagtaagaactggtgctttcgtcaaggcaaaaggagtagcaggagtgactaacttagtagcggcgtcagtcattcctacgcgaacctcatgtcccattttttgcagtccacgtactacttcgattcccttgtaagcagcgatactgcctgtaagatacactgcaattcgtgtcattatgtcacctcaacttattttttcttaattgattatagcatttttagaagcaaaaaaggggccagtgacaatcctgccctagtcccttacttttgtttatccagcttaatttaatcctgtaagtcttcagtatgatcaggatcgatcgtaacttttccagccaaaatctcttcaagggccttcccaactgacttgcttgaatcataatgttcaagtaatggggcagctcctgcatctaattcattggcacgcttactagcaagcataactaatgaataacgagaatcaatatgttttaataattcatcaactgatggaaaaaggatcatttttcggcatctcctaacatttcaagataacgtggcattacacgggtaacacgaagccgttcagtacgaataatgtctttaatcttttcaactgcatttggtacttcgtcattaactactgcataatcatagttttgcatcatttgaatttcactaaatgctttatgaattcgtttattaatgacttccatactatcagttccccggtgaatcaatcgttgttttaattcatccaaatcaggaggggttaagaaaataaacacgccatctgggcacttagaccgtacttgcattgctccgttaacttcaatctcaaggaaaacatcttttcctgaatctaaggtctcattaacatattttaatggggtaccgtaatagttgtcaacatacttagcatattccaacatcccaccagtttgaatttggtgttcaaactcttctttgcttacgaagaaataatcaacaccattaacttctccaggacgtggttttcgagttgtcatcgaaattgaatattgaaaatcattatcatttgaatcaaagatagcttttcgaacagttcccttcccaaccccggaaggacctgaaagaacaattaacattccacgatttgccattataacgctcctatttatttaatcgtattaatactataatgcactagattagtactgaaatcaagcacctgaataacaaaaaatcattgagctttttgcttgcatttctgaatgtatgttcgtatactataatcaaacgaatgttcggaggcgcgattatgcaaattgaacaaaagtctatttttaaatttacgccacaaattattagtgataagcttcggcatctttttgaagaagcacctgctgacgatcagcaagcagggttacttactccccaacctgctaaacaacgacaattatttttaaaacgagccattaaagataaaattaaagcaacgtttcagctaatgccaatcaacaacgatggctatcccgtaaacgttaccggtaacatcgcccaattagcgaatagcaatcgataccttattacgaatcaaaatgtaagttatgttgttaactttgatcaaattagatacatcgcgaatttataatattggatttaaagagagactgggaattagctcagtctctttattgttttaaagatatttatacagtagctgcctggattccgatcgttgataaggcaccccaataggctagcttcgcgtcgtagctatcctcgtggaggaagacgaagtcgcaagtgacttctttcccactccctcttttttattttgccatattaagcaattcttgcgcatgctcttttgtcaactgagtaatcttttcacccgatagcattcgcgcaagttcttcaacccggtcgttttctttcaatggtgtaactcgagtagttgtccggtcatcatggacagatttcttaataaggaaatgatgttgcgcaacggctgctacttgtggcaggtgcgtgatacataaaacctgtgaatgttgagcaattaagcgaatcttatcagcaattgcttgggcaacccgtccgctcaccccagtatcaacttcatcaaaaatgatactagtaacgccttccttttgcgcaaaaattgtctttagggccaacattacccgtgacaattcaccaccagaagcaattttagctaacggccccattgattctcccggattagtccgaatataaaattcagcctggtcaattcccgtcggtgtaaattgttcccgactttgattagcaaagtgaacttcaaattctgctttttccatgtaaagctctttaagctgctggtgaacttttttaccaagctcatgagcagctttttgtcttacctgactcaatttacgaccggtctctcgaatcttattttcggcttctcctaaccgttgctctaggtcactgctagaatcagccgcggcctccatcgaatcgagttcttttttgatcttatcataatacttcaaaacatctgccaatgtatcgccatacttatgttcaagatcaccgatagtagttaaccgttgttcaatctgagctaaccgttcatcatcaaattcaagcatgtctaattgttgactagcttcattcgctacatcttgaagagcgtaataagcatcattaagagccttactaagattatcataagcatcatcaaattcagcaattgcattgattgagtccatcaccgtggcaacttgatctaaaacaggcgcttgctcaccttcattaaaggtcgtcacagctagttgaagagcattattaatttgttgaaagtgttccaatcgatcacgttcactaattaattcatcttcttcattttcttttagattagcttctgcaatttcattgacttggtaccgaagcatatccaatcgctgcgcccattgttgttcatttgcttgttttttatttacagcagctttgagtttagaataagcttgatattcttcttgatattttttaagtaagggctgaacctctttagccgcaaattggtcgagcattcctaaatgagtctcaggttgcattaattgttgatgttcattttgcccttgaatatcaactaatcccgcaccaatttgacgaagagttgccgtattaattagttgaccattgacccggataatattgcgaccattgcgatgaatttcacgggagacaattaagatcccatcttcatgatcaattcctagtgattcaagtagtttatcaaattcaggatcatcaggaattgcaaattgtccttgaaggcttaatttttcttctccacggcgaatgaattcctgcgatccacgaccaccagccagcaaaccaactgcatcaataataattgactttccggcaccagtttccccagttagaacagtcatttggtcagcaaaagttaaggttaagtgcttaataattgctaaattatcaattgtcaattcttgtaacaaaaattttcacctcgcctagtcgagcattgcgttaagcttttcttctaatttaattgccgcttctggagacatacaaactacaagaacattcccatcatcaccaattgttgtgaagaccgttggaaaatccatcttgcgaattaaggtagctactaccggcccattccccggatgaactgttaacgctaagaaacagtcattgcgctttaattgttccaaactgtcttgaagggtctgagctaactgattttcatgtccttgatgatgatatgctggcaaaccataacgataacccccattatccgcaggaatctttatcagttgcatttctttaatgtcacgcgaaatagtcgcttgagtaactgtcaatcccatttcacgcaggcgttcaacaagatcttcctgccgctcaatgctctcattagtaatgatttcacgaattttttgttgtcgttctgcttttttcatggattaagtcacctttatttattccttatgatttaaatcatcatcagcggttgcaataaccttatcgatatttacttcttcggcaacaatccccggattttcacttaggcggaggtgaactaaaaattccatatttccttgtccccctttgattggtgaataatctaatccaaggatatcaaaatgatcttcacgggcaaaggtcagcacttcttccaaaactgctctgtgaactttatgatcatgaatgatcccatttttgccaacatgctcttttcctgcttcgaattgtggtttaattagggccactacttcaccacccattttcagtatctgagccaaaggtggcaagatcaaacgaagggaaataaacgaaacatcaatcgaagcaaattctggttgaccactagtaaaatctgctaacttactgtaacgaaaattggtctgctccataacaactacccggggatcttcccgcaattgccaaaccaactgattagtcccgacatcaagagcgtaacttaacttcgccccattttgtaacattacatcagtaaagccaccagttgatgatccaatgtctaaaaccgtcttgtccttaactgaaatatcaaaaacttttaatgctttcgctaatttcaagccgccccgactaacatatggcattttatggcctttcatgtgaagggtggtggtaatcggaattttttgtcccggtttatctaatcgttcattatttttgccaagaatttctcctgccattaccgcccgctttgcttgttcgcgagagtcaaacagcccttgttggaccaataatacatctacacgttcttttttcataatccctttccttatttaaaatatgctaaaaagtcatcataaccagcaaatgacttgccagtaagcttttcaagattcttttgattttgattagcagcagttaaagctatctgtagctgctcctttgcaccatctatgccaagtaatcctggataagtatttttttgctcatcagcatctttgtgaacagcttttcccatctcttcagtagtactgaggacatccattaaatcatcatagatttgaaatgctaaaccgtagttttcaccaaatgctgctagctcttgtttgatttcagcagattgatccatcataatcccacctgccaaaacagcatagcgaatcaattcccccgttttttgacggtgcaagtatttcaattggtttaaatttaaatgttggtgttcgccttcaatatcccgtgcttggcccgcaaccattccagatggtcccgcggcttttgcaagttcaagggtcaactgactccgaacattagctggaagatggttatcggcaacccactgaaaggccaatgtcaataatccatctcctgctaaagttgccattcctgctccaaatttacagtgattagttggttttccgcggcgtagatcatcattatccattgctggaaggtcatcgtgaattaatgaatatgtatgaagcaattccaacgcagaagctgcgcgtagcagatcatcattaagcgtgccacccaacatctcaatcgttgtaagcgtcaatgctggacgcagccgcttgcccccagccattagggaataagccattgagctttctaacgttgcttgatcaatatctgtggccaatgacttgcttagataatcttcaatctgttcttttaaaatcggcaatggtgtactcatctttttctgctccgttgcttattgttcatcagtgctaccaaatccacggttaccaccgccattattgcttgggtcatcggtttgtttttcgtagacttgctcatcaccattatcgtcaattaagtgcccaagcgttttttcagcatttgttagcttcgtttgtaattccttagaaagcttgattccttcttgaaactgttgaagggcctcttctagtggcacattcccctgttcaaggtgattaacgatctgttgtaattgtgctaattgttcttcaaatgttggttttgctgttgccatcttagtgctcctttaccttttttatttctgcttgaacttccccgtcatcaaaatgcaggtgaacattttgcccaaccgttaattgactggcatgattaacaactttttcatcactcgttacatatgtatacccccgactcataattttaagggggctcagtgaatctaattgtttaataagagttgtcacttgttgtttcttttcattttggttggcaagtgaggctgtcaccaattgtttttgtaattgattaactaactgttcttgttgttgaacccgatgcagtggagaaatagccgttagacgcccacttaatctttctacgttcattcgcagctcttgcattttattttgtgctgcttgacctagctgttgagttaattggtcaaccttttgtgcatagttttcatataatcttgtcggttgctgaaaaatatagctttgcagctgtttattcaattgttggcggtcaaaattaattttagtccgcatcgtatttaataaacgattctgatcatctttaagtgtcattaatacatcgtttaattttaccggcgttgctaattcagcagcagcagttggggttgctgcgcgttgatcagctacgaggtcggcaattgttgtatctgtctcgtgaccaactgatgaaattaccggaattttactattggcaattgcacgggcaactacttcttcattaaaaggccataagtcttccattgatcccccaccacgaccgataataagggtatcaaagtcgccgcggtcattggcacggttaatttgtctagcaatatccgccgctgctttatccccttggacgacagtgggatatagaacaacttgagcaattggataacgtcgtcgaacagtcgtattaatatcccggataaccgccccatcaatactagtaacaactgcaattcgtttcggaaacattggaatctgttttttaggtaaattaaatagaccttcagcgctcaatttcttttttagttgttcaaacgctaagtataaagagcctagaccatctggctccatccgatcaatataaatctgatagcgaccacttttttcatataaacttacatgaccgactacacaaactttcatcccctgttcaggagtaaatttaattttccggaattgatgctcaaacattacagcatcgatcacagcattatcgtcttttaaactaaaatactgatgcttttgccgtaaacgaaaattagaaagctcaccggttaaataaaccgtatgtaggtatggatcccggtcaaacttcattttcaaatacttagttagttcactaactgttaaatactggcttctatccatgatgcctccaccgcgctaaatcaactgtttgttccattaaagttgcaattgtcattggtcctacgccacctggaacaggagtgattgcctgagcttttgtctttaccgcttcaaaatcaacatcccctgtcaatttaccattgcttaaacgattaattcccacatcaattaccactgctcctggttttacatctgtctccttgataaggttaggcacaccagtagcaacaattaaaatatccgctgttttcgttaaagcagaaaggtcgccagtacttcttccagccattgttacagttgcgttagcattatttaaaagagctaaaagaggtttaccaactaaaatactccgaccaacgataactgcatttttcccttgtaaatcaatattatattctgccaacatccgcataattccgcgaggtgtacaggccactggataattaccatgttgattggcaaacagttttcctaagtttaggggattaaggccatcaacatccttagttggcaatatagcattggtaattacttctgaatccaattgaggaggaaggggttgttgaacaagaatggcatcaattgtgtcatcatgattcagcttttcaatttcggcaagaagctcatcttgactaacatcagcaggaaatttttttaaaattgaattgattcctaacctagtagccttattatgcttatttcgggtatagattaagctcgctgcatcatcaccagcaatcacgactgcaattcccggagttatattttgtttttcttttaactgtgccaccagtttttgggtctgggcattgatttttttagcaagggtcttgccatcaataattgtcgtcacagtgattcctcctcgttaaatttccattttatattctaccataataatattgcgcttaagcaaaaaaggagtggaatcagaagtttatcacttcatttttccaccccataattattgttaacagtaatattagttattcgtgttgacttgtttttcaaatttgccaagggctccattgataaatttacgtgacttatcactgctgaatgttttcgtaagttctagtgcttcattaattgctactactgttggaacattttcagcatattgaatttcaaataaagcaagccgtaaaataactaaatccggctttgctaaacgattgatggtccatctgcttgcgagaaggtcattgatttgttcgtcgagctgatcttgatgttctcgcaccccatttactaaagtcagtaaataagggggaatttgcttttcatcatgatgaggaattgcctcatacacagtttgaatatcggcttcaggatctgattgcaaagcaaagagaacttgaaaagcctcctcacgaatcatgtgtcggtttaaactcattttattcaccagcctcgtcattaagatgttcgccaaacaagtcattagggtctacttgttggtcttctttagatgttacgattcccttaatatgaacattaacttcttttacttttaaatcagtcattaatgtgatttgttgtttgaccttatcttgaatcattgccgctactttaggaacagagacaccatattcaacataaacatccacatcaagtgataatttttcatcattgctggaaagctttaccccacgccggcgatcagagcgtcccaaaagttcacttacgctatttgcaaatgaaccatacatctttgaaacaccatcgatttcacttgcggcaatccccgcaataatttctaaaactcgtggcgaaatttgaattgtcccgagtgacttgtcttcactacttaaaacaatctttgattcttcagccatcgtcagccctccaatttatttcttctcttaattatagtaatcatttctattctgcactatgttcgaacaaattgcaacaacttggtcaattaggaacatagcgccagtttagaaattaaccgcaaattatgattataccaatcatgaacgactaaatcgagactagatgtggtaaattgtccgaaattaattgatttaaattcttctaacgttttcaagaattggtctgcctgctgaagcggactagtataccgtgcaaccgtcacatgtcctgagattgttggatatcgttcttttagcaataagtcatgtaacggcagttctttcctaagtacattccgtaaagttgataattctgctgaataatacccttttacaagaagtgctcctgaactagtgatcattcctgctaaacgccaatgaatcggtccaatttgtgaaataatctgccctactacgtttttatatttttcctcttcaaatgttgagagcgaaaagtatgaactagctgcaataaggtcaataatcgtaatatgcaggtcagcaggaggatagaagtattggttaggctcaattgcagccaacttttgcaagcaaaacataatgttccgactaacgtgcgcaggcagtgaagcagtaagcgtcagtcctcgacgcatatctttatcaggatttagcaagttacgatctagctgttcttgatgatttctaattgccgacattccctgttgattaatattattatacagagtagtaagttgcatactattttcctacgattattagatcagttggcgcctttgtcagcacttcaactccaccgtgagtaaccagaatatcatcttctatccggaccccgccgatttcaggaatatagataccaggttcaacagtgataacttcattgttccgcaatttaatattttgagcactgggtccatagctagcaggcaattcatgaaccgataagcctattccatgccccattccatggttgaattcatccccataacctgctatttcaattaattgccgtcccgcaaagtcaagttggtctcctcgttgcccaacatgagcagcttgaattacagcttcacgggcctcattgacgatttgataaacatcacgtaattctggatcaattgaaccaacggcaaatgttctggtcatgtctgccgtatagccattgaagtagtagccaaaatcaacagtaacaatatcgccgtcttcaatcaccttttttgaagccgtcgcatgcggtttggccgcatttttgccactagcgataattgtcggaaaagaggccccgcttgctccatgttctttcatccaaaaatcaagcaagttcgcaacatggcgctcggtcatcccagcgtggacattttctaaaagataccggtatcccgctgaatgcaagtctgcagaagcacgcagggtatttacttcatcactatccttaatcattcgcatccgttcaatttgttggtggaaaggaacaaggtctgtcgccatctgctcatcaagcatatcaaataaggcataagtaactgtatcttcatatcccagaacattcactttcatcccctgacatattttattaagcgaaccgtaatagtcacgggtaatcattcccacaacctcatcgttttcaaattcttctaatgcaagctggtaccggtcatcagtaataataattgcattatcttttgttattaaaaggcatccatcgccttcaataagattaaagccagtgaggtaataaatgtttttttcatccgttactaaaaatgcatcgatatataatttttcaaatttcttctgtagacgtttaattctagacatagtacatttcctttaatactgccggttagagtaatcacgagggccaaagatagccgtcccaacccgcacacaggttgacccttcttctaccgctatttcataatcatgggtcatccccatactaagaacatctaattttaattgatcattttggttgttcatttcatcgcgcaattcacgtaggcggcgaaaaatcggccgcgttttttccggatcatcataataaggagcgcttgtcattaatccccgtaactttacatgtggcaattgaagactggccttagctaattccatgcaatcttgcaaagttggcttaaccccaaatttactctcttcttctccaacattaacttcaattaaaatcgggattattcgattatgctttcttccttctttttcaatcgccttcattagcttaagggaatcaactgattgaatcattgtaacgtaatcagcaatgtatttaaccttattacgctgaaggtggccaatcatataccagttaatgtcggctggtaattcatcatgctttttatctaattcttgaacataattttcaccgaaactgttccatccagctttataaagctctgcaatatctgccgccggatgatttttgctaaccggtaacagttgaacatcttgaggatcgcgaccgctgcgcttacatgcagcaataattttttcttggacatctttagctttatcaacaatcgtcattaaacagtttgctcccttcaattgtgggttaactatattcttacattatagattaacatataattgaaaaatatttaaaaataaaaagactactatttcatgtagaaaagtagtctttttattactattcagcgattgggtaaaccgataccttacgcttactgcgacccatgcgttcaaatttaacaacaccggctaccttagcgtataatgtatcgtctccaccacgacccacgttttcacctgggttgatgtgagtaccacgttgacggtagatgattgatccagcagttacgattgaaccatcagcagccttagtaccaagacgacgaccagctgagttccgaccgttagcagtggaaccaccccccttgtggtgggagaagaattgtaaattcataatcatagttgttcacctccagcaatgaactttaatcaaacatttttacttcaatgttttgtggatagctttcttggatatcacataatccatttaaaaaggttttaagaaggatctgactatcatgaccaaggtctaatcctgtaacttccagaaagccaccattatcattatcttgtttaaggtgaggctttgtatgaacaacttgttcaaggccgttcaccgttgaaatagataatgcagaaaccgcggcacaaacaatatcttgcccatatggaccagattcagcatgcccagtcattttaaaagaagtgatccgctgattcgaatctaaattaaactgtgctcgaatcatgatctcacctccgcattaagcgttgatcttgttgatagtaaccttagtgtaaggttgacggtgaccttgcttagtgtgagtgtgcttcttaggcttgtacttaaaggtaacaaccttcttttccttaccttgcttgtcaacagtaccttcaacagaagcaccgtcaactacaggagtaccgatcttagtgtcgtctccaccgacaaagataacttgatcaaaagttaccttgtcaccttccttagcatcaagcttttcaacatagatagaagcaccttcttctaccttgtattgcttaccaccagtaacgataattgcgtacatactttgtgcacctccttaatatctcagactcgccgtactaagcagctaaataagctttagacttaataacgcgcggttgtagttgttggttcacaaatacaacgtttgtataatatcaaatattattctcttcgtcaaccgtaatctctacttttataacgaaaaaaggactgtgacataagttaagttactttcataaaaaggaaatacgcagtacaacaatggaggctgggaaaaaactcctagtccaaaataaaaaccggatgatgaattttttgaacaattcatcatccggtttttatgtacacaggaaatcgttcctgatatgatgtaattacccctaaaaacaaccaaagggagcgatttccatgtatcaaaattataccataggacaaaccgaattcgtactaaactataactatgatttaccacaaaatcatattgcgcggctaattagtgattttgtcgactcgattccacaaaatgtgctattagaagattcaggagcggctaccggccgcccttcatcgcatccagcaattatgcttaagattctcttgtttgcctactcacgtcaaacttattctggaagaaagattgaaatgatgttggataagaacctgccaatgcgttggttagcccatgattatacttatagctaccataccatcaataactttcgacgcagtcagcacgctagtaagctaattaaacatgcctttgtctactttaccatggctttgaaagatcacggactaattcaaaatgatgcagtttttatcgatgggaccaaggtagaagccgatgccaataaatattcatttacttggcggcgggcggttgaaaagtatcacgctaagttaagagaaaagacgagtaagctttatggggaactagtagaaaaacaagtggtgcaagaaatggcacccgagctggttacttctgccgaaggcatggaagtaatgaaacaagagcttgcggagaaaatcattaagttagatgaagagattaagcaagaaccaaaaatcatcaaaggtggttcagttagaaaacggcgccgtcgttttctaaaaaacttcgccatcaattaagcaacgacctaattccgcgtgccaaaaagtatgaacgtaccgaagatatcttccaaggtcgtaatagctatttcaagactgatcatgatgcgacttttatgtgtatgaaggaagatccgatgatgaatcgggagttgaagcccggctataacctgcaaatcgctacacataagcaatttgtccttgattacgggctcttttcaaatccaactgacaccaggaccttagtgccatttcttacccagtttcatgctttagatttctttaagcatatcgttgccgatgccggttatggtagtgagtacaattacacaatgattcttgatcagtttgaaaagcagcctgttattccatacacaacttatcaaaaggaacagaaacataaatttaaaaacgatccaactaaatcacaaaattggcagtataatgccgaagatgattactacatcgatcatttaggagttcgctttagcttttatcgttatagtaggcgaaccgataaatatggtttcgaacgtgatttcaaactctatcgagcggataagcaccaactgtcagaacaattggatgagttggcaaaaacaccaagtggtcggcaacactatatgcaggttaacccaacgtggaattattacaaggctaaagtaaaagcaaccctctcaagtgacgaaggcaagacaatttatcgtcgacagaagttcgacgttgagccagtctttgatcacatgaagagggattttggcatatgccgaactcatctacgcggacaacgagctgtggaaaatgacattgggctagccctggtggcattaaatctaacgaaattgggacaatcaattagtcgattggcgactaatttcataaataatttaaaatccgaactacgatttttggatcgatcaaaaatcatagtccggattttactgttagagaaccaagaattaatagttaattcccagcctcctattgttgcttgcggggggctcaaaaacgaagtcacgagtgacttctgtctcgctccctcttcctacgattagtcaagaaaaatatttagaaaagaagagtatactaaaccaacccggttcttcttcaaaaatcgagaattagtggtatattaaaattgtgaggtggttatgccttcacagggactattgagtccgtataccgatagtggtattttttatggtgcttaatcatggataagagacatttcagagttttattcatacaagctaccatggcgaccttgttcagttttggacgaggtcgtttttcttttaaacgatagtaatagtcaacaatatgattagaattagcgtgttgttggcggatcatattacctacagtaaaatataagagcttacgggcaatcgggtttccacgcttattaatatgatcttgacctaaataggttccagattggtaacgacgaatatcaattccaacaaaggcattaagctgattagcattgtcaaagcgactaatgtcgcccaattctcccattaactgagccgcagtttgtttcccaattcccggaaaagagcagtataggatatactctggtaagcgctgggcaatagattccatccgcttgatgacctcttcctttttacgggttaaggcaattaattggcgagcgtagtagcgaacttcatcaacctgaatggtatcaccagaaacagccggatatgatttttgggcgagatcgattaatcgatcggcatacttataagctttcatcttagatattcgtttatctgtagaggccattagaatattctttaatttaactctcgaataaggcctaactagtgctggatgaggaaaaagctccacgatattcaacgctaatttagatgttctatttacaaataattgcttaagttctggaaaaacttgttcaagtgcagtatgaagatgatttagacgatagttccaatcagcattgagctgattataaaaccgactaagctcatgtaactgaagatagtcttttttccaaggaactgttaatcgaaaagcattttcctggacagtgagcgcaatccgatgagcgtctttctgatcggtcttaactcgtcgtagactctcggactttaaatgaagttctagtggattaagacggcaaaagcggagaccattagtctcacagaaatgtccaattactcgcgaataaattccagtcgcttcaaagtagataattggcttctgagcttttttaatcatatctcgtagagcattaaaccccgctttcgtgtgtactaaagaaaactcctttaaacagtgtttccctcgataccagacacagtagcttttcctcattgaaacatccaaggcaaatatatcagacataaaaagacttcctttttataaatagagctagatataaccgctatcctagatttgtacttcatttcctaaatactcgaactcgtagttccacaacctaaaagcaaaatatcaaatcaaagatagcggagatcattttataatacggactcgaagtccctgggagcatgatcgatcttagctctatcttcagaataacaaaaaagtccaggacaataattatttttgtcctgaactaatcttaggttgtttgtagtagctattaaatcttttctaaagttccttctagttcaccatcaaaaaaactaaccaaagaaatattctcgctactaaactgattcaacatttttgccacgctttgtgtcatataacgtggagtataaatcatgccatcttctagccaccgacttactaagcccagaaatgctgaatcaacaaaggaaatctgcaaattaagtgggaccttcaactgttggttcttattcacttgctcattaaagtgtgtcatttcatttgctaaccgattgtaaagttgttcataaaagaagttattcttttcattatttaatagaacatcaaaaatatcggcgttattttcgatatactgaaacgctttgcggagtgaaaacacctttaccgtccgttctttcgaaaaattactatcgatcattacttggttaaagaaatcgtcaataatctcttggattgctgactgaataaaatcttgtttatccttatagtgaagatagaaagttccccgagtgatgttggcagtttcagtaatcttttggacgctaatatcttcaagcttttcacgtctcatcagatatacaagagctttgcgcagactattacgtgttttaattacacgtgggtctgtcttattagcagccatttaatcatcatccttccatcatacagcttaagtcctttctactttcgtacttctactgttttaaagtatagttgtcatgaaagcggtttgtcaacgaaagtgcagattttatcttaacaaaataattatattagattattaccattgacaactttgtagtgaaaattatatacttaaatctgtttggagcggtagctcaactggatagagcatcggtcttctaaaccgagggttgcgagttcaagtctcgctcgctccatataaacgttatttacaaaaagaggatagagaaacgtttttgtttcctatcctctttttcagttactctcatctaaacttacagataattttctaatttttcactttcattttttaagtatttcttaaatgcactctcatatgttacaattttgttgcaaaaatgaacatttttcataataatgaatatagagattgctttttgaggtgattattatgctaccatttcttattattgttttaattttggttgcgtcggtaattggtgaatttatgtttggcagtcttagtaaccaagaaactggaaaacatagtgcaactaccaatcgcttacgagatcgaaaagcttaatcttatattccgttcaacacaagaggccgaggaaattcctcggcctcttgtgttttatcttaatgttggtcaatcattgcttggtaagcatcggaaatttgatcaggtgttaactgccaatcactaattcccatttttagcaaaagatgccaagcatgccgaaagctttcttgttgatgattaaaataggcatcacttaagaagtgtttaattgctagatacgatttattaaggtctgctaactttgtagatcttcttgcatctgtaattcgttgccaggcttgattatctagcacaaccagatgcgtccacttcatctttgcactatacaacaaaagtaaagctactgattcaacatacgattttagcaaatcttctttgtctactttactaggattaactaccttataccaccctgctgcttcagccatatttgataaagaaatgtcaaggtcaacaaaaatcgtttgctttcttgtttctggcccaatcattaattccttttcatcatcaatctttaattctaaatcgataatttggtgaagcattttagtaatatctaacattgctatgcctccacaataaaatctactgcttattcttcctcattagaagttggatcttctgatggttctgccgaagatacttcatctaaagattcgtcttctgctacttctgtcgttgctggtgattcttcatcaacaatctccatatgatctgttctcacggctagagcggaacggtttgccaaataccactcgcgaaccaggtcgtaatgaagcaatacatcaaagaacgaaacttgctcatccgaatctttaactaagaaggcccactcttgactataatcgtccgggtcaaaagcaatgtcaagtttggtaccttgatctaatagtaactcagccccattatttcgtggtaaattcatcaacatgtaatcttcatcagcagtcgcaacaaataaacgatcaattactgtcagtggaagttcaggcttattcaacataaagcggcgatcatttgcagttgctaaaatgcctagatcaatcgtgaaatcaagatctttttgcaagtatttagcaaaatcaatcagaggtttaaccgcatcccgtaactcaaggtcagtatgctgtttaagcgcataaacgataaaataatttactaatgcgcggttattaaattgcattaatttatcttctaagcttagatagaaaagtggttcatgctgactttgctctgtaaaagccgcttctccccgactatcgacctcaaatttaaaaatagcttcaccgccaatagccgcaacagtcgcttcaaattcatggtttaattcattttctgcaacattaactgctgtatctccatgcatttttaataggtgatccataaaaatcagataatagtcagccgccttatagtgtggcggaaaattaataaacgcgtttgccaaatccattttggttagtttattagcggctgataatagattcttagcatccttagtctgggctaactggtctaaaaggtcaacatatttttgtccaaggcttaaaacatctttaaaggaatcagaaagagcctggacccgttcactaggagaagtcacgattcgattattgctcatcgtcgtccacctgctttccttctgatccatttaaactggctaaataattagcatataaattgcgattagctaattcgaaatcttcaaagctgccaaaagtatcgataatgctcttttgctcataacttaaaatcgtattttcttttgataaggataggacaacgcgttcattatccttaatagtttgggctgcattacgagcttcttcttcttggtcctctaacttttgcagctgctcaaccagttcctggcgactctccttgttacgacttgattcccaaatgccagatcgtgaactaatttcttttaattgttcttgaagggcttctttacgttcctcacgttctcgttgatgatcaatcaaatcttggagacggtcattttcactagagattttactaatccggtcactattgtaacgtttattgtcacgcgctaattcaaaagccgtccgtaatttatcatattctgtttggtcaaaagaaaaacgaacattcaaaacgtctaattcaccaaattgacggcgattccaccagttaccaaaataaatccggtagtgaccagtttgatattcttcataataaaagaagggataggttttacccaaatatttaattaagttttcactaaggtaattacttaattgatcagccaaatcatcgactaggttcattacacctttatcatttggttgttgttcccgatgttcaatctctttagcatagcgttggttatctagtaattggtagatttcccgatcacgatggtttgaaattgcatcattaaagcgtcgcaaatactttatctttgtaataatttgttgattgatgacttgagtaacatcaagtgaatcactattagtttctacactcgccataagcatgctccttgtctaaataactacctattataataaataactttactaccttttttccactctttttaaatttttttcaaaaactttatatttttagcacagatctgttttttgaaggtaaaaataaaagactttccataatgaaaagcctttattcccttatccaattattcaaatatcaatgaacccctaacgataatttagcaaaacggctcatccgatcaatcgtccaagctggttcccagacaaattccacatcaacgttttttacctctggaacctcttttaccgctttagtcaccatatcagccaatacatttgttaatgggcatcccattgtcgttagcgtcatttcaatcaaacatattccatcattatcgagatcaattgtataaacgagtcccaaattaacaatatcgatatgaagttcaggatcaataactgttgctaatcgttgaacaatatcgtccttaattgattgtttgtctctcataattaattatttttccaatacttctcaataaattgttgtcggccaccagcttcttctaaggcaaaacgctgcggatctttcttataaaagccctgatgatagtcttctgcgggatagaatggctgcgcatcctcaattgttgttacaatctttgcatcaccaaaacggccgctttcctgtaaagccttttttgactcttctgcagttttacgttgttcatcatttttaacgaaaattacaggacgataattgtctccccgatcttggaattggccacttgcatcagtcggatcagtttggtgccaataaatctctactaagtctttgtatgaaattttatcggggtcaaaagtaatctttactgcttctgtatggcctgtcgttccagaacatacctgctcataggttgggttggcaacatggccacccgtataacctgattcaactttgtcaattcccggataagtatcaaacggctgaaccatgcaccaaaaacatccgccggcaaatatcgctgtatctaaactcatatatatcaatcctttccttgattcctcaacgtttatagacgttatgttttttgactaaataccgagatttaatgagaaatatcgagaaacctagaatattttttcccatgattttcccatgggaaaatcattcaattcacaaagtttctctaacttattacttaagtataacccaatatatcaatttagattagttatctatagtgtttactaaattggtattcattcatcgccgcatttctttatgatcatttcgaaaaagaggttttagttttacagttttcggatttaaagctttttgttcgttaatatgtttatgataaatttgctcattatcatttggaagaagttctagcatttttgaaaaagccttactttcggtactaggatctgttgctccataatatcgcattaagttaattgtaaattcagcacgatcaagttcattaaaaggtaggactaaataattttctttctcccaaacattataggctgcatttgcagcaattaacgctgtccgcttattaccatcttgaaaaggttgtaattttgctaactttgcaaatacgagccatgcatcctgtttagtttgcgcagaatgcttaaactcatcaataatcttttgtaaatcagctttataaactacttcgggaggaaaataatgatcttttccagctgtatcaattgtaattgcaatattatcatctggattatacattgaatttcttaaatgaccaggaatagccggatcctcttccttactatatacaaaagatttattgatattaataattccatcaactgtaaaaccatctttttttactgctttaattccagctaaagcatctttaaagattggtacatcctcattatcttgttccaaagcattagtatttcctgtatctaaagccttttttgtctgagcaactgtgcttccataaccattcaaactcccaaatgaggcaataaattgagctaaagctgtattatttgccataactatgctcccttctttcactattatctaataatacacgatcactttttagtttttcttactttcttcgctgagcagcaattttataaatgcgttcccaccattctttatcagactgatttttacattcattaatcttttttcttaattcatctagaggaactttaagaagccaatttttgattaatctagttgaatcagaatttaaattcattgtaccaatccctactttattttcctgaaaaaattctaacaatttatatcaacctataagtttcaacataagtaatatttaacacttatattgaaaagtaaaaatatattcagctaaaaattactattctaactatataaacttcataaactcaagtttatgaagtttatattttataattaaaatttaagtttcaaatcttcgactatttatcatctaaatctgtactgatcattgataaatcaatattagatgaatcagataaatcagcgttcatttgtgattcttgactttcctgcttgttagtttctttagtctgaaaactatcttgtttgcttaactctttcggattattaaagaaagactgctctaaagcgctaattatttcaccctgtgaaaaagataaggcgcaaggaaaatcagtaattccgaacataccaatgactaaaaagattaattgattcactgattcgctaggagccgtctgtgcttcaaaccaagcgctaacttcactatagtccggtattctaattgttttagtcttggtttcaaattttccattttggatattgtcgcttttttgtccattttttaaattactattattaaatttcatttgttgatttgctcgtattttagggagtgtagaaggtaaatctacttccccatacaatgcagtaataaatacaatggattggccaatagatgaaccaagcgagttttgaatatccatccattcttttactggtccttcaatgtacaattgtaaattacgtgctttagtaactgctcctctcggcatatgcttcgctcccattcattatatatacatatcattataacaggattttgtaatctatatcattctttaggacccattaatgctttcaaaattaaaactaagcccatcctatttaatacctgagcatatgatccatcgacccaaacaattggaattatttgatctccattgaaactcataaatttattgttaagtttctcataaagccgagtagttttcattggtactgcagccccaccgaacacaaacccaatcttaatacttgttccaatcttccgtagtgtttgagaagcattacttacaatctcatcagcaaaaggctctgctgctgaacttactactttaataactttttctttactgcctggcgcaaatggattttcatcctcattaagatatttttgtaattgacgaatattatcaaatccataattcttagtttgtaagtaatcaaccgaacgttgaaggacattatcgtatcctcgcataatagaattcgaagccatgatatttggctttccattagtaattactgtacagtcacttgttttaccaccaaggtcaaaacctatcgcatctttaatatttttaatgaattgattattaattttatctgctactttaggatacttttctttaagagaattaatgatgctattagccaattcaggataagcatttggcgaatttttaatcgccgcaaaagcaacttctccctccaatcctacaaaaacatttttgaactgcagcgatacactaattggatttttaaagttgtgaaatgtaacaatatgcgtattatccatatatcttttacgatagtttcttaaaacattaggttgttttgcctcactgattggtaatgcagttgtcatatacacgtccatttttaactgattatctaaatcttctccttttttataagcatcctggactcttttgccggctaaattgcttaatgtaagtaacaaagtaaggtcaacttcagattttcctgataagtcattgtaatcaaaatgcgttaacggcattgtactatctaaagctgcttgaccgactaaaaatcgtcctgcttcactaattgaactactagtaatagagacatccatatggtttaagaaatcgtccatataagcatctttttctgcttctgagctaaattcaacgggagcagttacatctaaggaatctttcatagcaattactgaaggacattctatatcttctccagcactaaaaatttgttttgcagtttctgtaccatcactagtaaagagagttcctttcaacgagtcatttcctgcatcatttgcaaaataaagtttataagtcatttgattacctccaaaatatattcgctacatagatgtcatattgaaacttatttgttacttatattcgctaactaaattataaatttcaatatatataacaattaacacttatatattaattctttttgttttaagtgtcaataactagacaaaataacatataagcaaaaagatttgatataactagagtaactttaatttcaattaagtgaagttctgccatcaagggactaatcttatttggagataataaaaaagacgatagttattctaccgccttaatttcacatttatatcatttatagcctataagataaccttgtccaaatttagacaatgttcatttactacattaagcttgccattatcatcaatcctaatgtactagtattaaaagtaatatgcgcaataatattcatttccagattactgaagtgtaaataaataaattgaaaatataagctcaataaaatgtagataatcccaattgaggctccgtgcatttgcgcaaacactgttgcaactataaatgcactaattccaactctcaattttgaattatcaacccaagatgctaaccaagcatcgacacgatggaaaaaactcttccgaaagacaatttcttccaaaataggtgcaattatcactacgtaagctacatagattatatttttttgaagtaattttacaatcaatgatgtatttgaattaccaattatatgattattaaactgtattacaattagtaaaaatataagttcaaccattaatggtaatagccctaagcctagtgcttccacaaaatttttccaggaaagccggcgaattttaggacgcagccataatagataggatattaataataaagtaaagctaccagctagcaaatatgaaccttcaattcccgtaactatgccagcatatagccaaattagcacataaccaaatatgattacccattcattaaattttaggctttgtcctttaagccataaagcatattttcttatttttgctgtcatattcatcaccactcactaattaacaactgttccaattgtcccaatccgttgaatttgaatcaattttctttgattaccatcaaatttcactaagtaaatatcggttgttttagaagaactatgagaacctttacgtgaagaatatgatacttcaacaatcccactaacaatttgcttttgatctataccactcacataagcattgcttccatcataagatgaagtaatttgttctgcatcaattatgctatgaccagttttatcaaggccattattgaacaacttcttatcatttagcactgaactagttgcaattccatgtactctattcttacgtttaatataagtattttgactatcataagtaaaatactcaataaagaactttttagtaattgcttgtaaatcttggctagcttcataagcttgggtattttcagatttagttttgttagaacttactaaattctcattaagaacactctgacgggctattttttgtctttcttttaagacctttttacgttgatttaacatttgcttgacattcgctgtttctttattgtattgaatctgctgtagcttaaatgttcctaaacaaattagactgacaatgattactatcaagcctataactgaggatattttcttacccatattaatcaccgccctcaacgttcataacttgcttagtcactggtttaattttttgataatttaataccttctcattttgtagatcataattcattttaattagataaacggcagattgattatccatagttttaaagctaaccaccgcagtcacaggcacctgattgttaactttaactttcccataaccaatttctacaccattattttctttgaaaagccattccttagtattaggatcgacattatatactttcaattgctcagctaacttagggcctaaatcttcttcaatttgggtcttattagcattccaatcatcatttgagtgtattcctccaacaaccttgcttaatccttcttgcagtttcttagaagctgttatttcagctgaatagtaattaaaagaatcgttaatagataatttgtttgcttcattttgttcaaccttattgatttggttgttagtaatccttaattgatctttgtaataatttaattgcttttgactcggtatgcttagaacagtagcaattacacacagaatcgcaattatccataataaaatattcggactcattttcctcatttctatcacctaattatttattccttctttaataatcttgattggatcaagccaagttccgtcatcagaatatccgctttgaactgatgaagtaattgctttcttggtaatacctaaatgtagatgcgagccacttaaagttccaattttatctccaactttaatttcatcaccttcattaactgtaatatcccctcgactgttaaacgcttcttgataaacttcattgtagccatctgaagatttaacccagacgtaccaccagccaacatcgttagcaaccttaaatactttaccgtcatgcactgctaaaattggttgaccagctcctacaatcgctgaaccaaaatcgtaaccatcatggaagtcatttccaccaccacgaatcattccggtatggccatattgttgaccattttcatatctagttgggccatctttaggaatagtcttaaatggccacccccatttaccactagccgtatcaccaccatcagtattgcacgcattattttgttgatcctgagcaaccccagtatctgcagtagcggcagcaccatttaagagactatcatttgagctaatgtttgaaccaccaaactcctgataagcccattgtgctcccggatcacgttgttggccgtattgattttcattaccagccataccctcataatcaataaaccaattccatgttgcttgatgaacatctgtcgctttccctaccgatgtttttactttggtataaccatggtttagctcgtattgcattagtttaatttcattgtcaagagtcagttcacttgggtctacgctcttaataattccaccagcaattaggcgttgattttgactccactgaaataagccattataaccaactccatttggcttccaaacatcaagtcccgattcacctattgcattaccgaccgctcctgctgcgccagcaccactaaagcccatctttttagttaaggtttcaaaaatagtctttgctgccttatactcagctgaatttttatccttccaatttccattactaataccgccagccgaaattgttgcggtatcaatactactatcacagccttcgtcgctacctactagcatcgcaataattaaggaaactgcaaataataataaagtaataactcctacaatcgaaataataatgctccaaagatgaattctagtcttccttttcaaatagaatcacctcttttataacaatggcagtaatttttcaattaaaatcagtccaacaataactgccaaaataactaataaaaattgtaattttggtacctgataattaggtacgtcgtcatcttcaattagtctttgcgcctgttgatgaacaactttattagtattttctttaaacgactttacttgatgaattgatcgtcttaataagtgttcttttgagggcttagtattctccttgtctttgttatgatgaattgccattagataccacccccataccgatccccttcttctttagtgatttgaactttaaattgaacattacgatccccgttgatattcataaggcattctgtttttttaagtttagttaatccttgtagttcatcgattgtgactgatccaccaagtgctgtctttagtcgtggcaaatcatcatctgaaatttggaaaaagaagcgaatttgaaataaagaaaacattttttgtacggcaatgatatatggatcatgcgaatttccatttataatcaaatctttaattgttggtgccgccatcgtaatagcacaaaagtttttgcgcatttgttccatcatcattgtgagaaattcaaccccataggcgaacttaggattaacaatattttcgacttcgtctagatttaagtaataccaaggaataaagtcaggatctaatcgaccttcttttaataatcgccgtagatgcataccgttttttacaatatctgcagataataacgttaaaattgagtaaatttgagcattaaatactgcttgtccttgcgctaataacccttgaatgttgaaggtcactacttgttctcgcgaaatatcagggaaacgtgtaataccgtcaaacatatcccctttctgttcctcaattgaactaaaagtattggtaatgcgactcattgattgtgacattaagctagttatatgaatctttgggtcccgttctgctttacgcttgcgttcagcagcatagattacaaaatcctgtaaagttgggtacatatcatgaggaaggccggtaattttgatattcggcatggtcttacgaggattagctacccataagttctgatcaatgtaaaagtctcctaaccactgagacaaaattgtcatatcatcaccagttgcgtcatcacaaagaaacttaaaaaagttagtaagttttgtaatgtgttgagccatcgagttaatctcatcaaccgtcccatcatcattaactactgtaggaaagacctcaaatggattaattaagttttctggtttatcaagacgaataataattcctccttgatctttagtttgatcagtatattcagacgaaacatcaaaattccgaataatcgctcctctcgagaaaacatcatcattcattttcttgagcaatgtagatttacccataccagcattaccagttacaaagaaaaatgaccgagttcggcgattatcccgttggaatggatcgaacataacttccccatttgttcgcgtatagccatagtaagagccattggggtcctccaatttcacgtgattaaatgggaagaaaccagataaattttcagcatcaataggagtcccaattggtttattccccatctcttcttcagacattgtaggaacaaagatggattcaaaatcatcaagctgctcatcagcatacctagccatatggaacattccgttctgacgaattacatcgtgaacacgcttatctaattctgctaaagttggcgcatagacaaaaattcgaaagtagattcgcttcataacttcgctttgctgagtaatcttttgcattaaccgcatttgatcattgtaattacctgcagattgaacattatctagagccttagctttcgatgaaattcgtgttgcttcttcagttgcagctttagaaatttgcttaacaatctgatcacgattttcagtccctaccgaaataacggctaaagtcgatggaccgtttgtgagattaacgccccagaacggggacattcctttagagggatatttataaattctcaagcacgttaggaagccgtctccaaattctaaataacgagcatgacgtttaagattcccctgtggttgtactcgtgctaagaagtctagatcataaccaacactttcataatgcaaaatatcttttttcttcatacctataaatacctctatcgttgcgtattaagattattaattcgtgtcaaaacttcttctttcctttttttgcttagcggttcaagaaataaagcacttcctccccaattcattgctgcattccgattattccttaaaatggtcttagtttttccaaataataataggaagaaatcttctgaaattagttgattttctaccaacatatttcttcgctgagtttgatgaatgtattttaattgcgtcatcaattgatgtttccttctaggatcggtttcttgactaatcgcaatattggtccgattgtatcgttttccccaataaatcttttgctccgtagtatcaactggaaaaggacaaatgataaatttcatatcacttaatgctgcttgtagaaaatgatagaagtcatctagcacgatattagcttctcgttgtgccatcgtacccacgcccagtcctcgaatatttagtaaatcagcatagccatcttccttttcttttaaggcaagaaagtgttcaggatcatcagtaatagctttatacgccaacaaattcatcatgggcgtataagctaatttttcactacggtaatgttctaacggatcttttccgttttctttctgtttacgactaaataaaccgctatgaattttcttttgctttgtaattgtattaattgccattactctgtcgctcctttcttatttcactaaagggcttaaattcgtagtaaccatatgatttgaaaagcttactttgccgatgagtaatcaacatccaaataacttcaaagtttcttttccctgggttagttcgaggatgtaaatccaaataaaaggctagaatcaccgaaagtactagaaagattactgactctaccccttgatctgccgggaataattggtcaagaaaaatacttggccctatcactaaggccaagcatgctatatcggtaagataaagccaccccaacttgactccttctcgtattccggctactacaccataagttttcatatgttccacctcgtttcttattgatagtaattaatcaggttttacgaacaagtttcgccaaaaaaagccttctcatttccgtattaagaaacaaaaagacttttcgttgattttatttaattgttactcatcatcaaagggatcactttcacgaccatggatatgaccactttgacttaaattaaactgccgatttttgagataactagcactacgttgttctaccccttttgaaagatgagtaacgtgttgtccaaatctttctacttttcctggtcgtgtgactgctggcggtggagtaggcgacgagtgtgtggttgtcggtgcgatattagtgtgagcagtattatcatagtaatcactatgtacgcttccttcatcatagttattctgtgggttaatatttgtacctggtgtattacggttaaaggtatcgttttgacttgagtttgtcccatagtgactgctaaattggtcattgcttacattaggattattaacttgcttgctaaaatcattattagcaatattagggtcattcggatccattgtaggtgattgattcatttggtccgcccattggctgttttgtgcatcattgatgccaacagtatttgagctaacttcatttgcattattcatttgatctgcctgctgttggaaattaccgtccgctggttcattccctaatagactatcccagttgcttaaatcctgaagaccgttattagcttcttgtgaaggtgttgatgggtcaatattagcagcagaatcagcattattaatctgatcagcttgatctgcaaaacttgcgttagcaccagttgtatctggatcatcaaagttaattccggctggttgttgatcttgatcgtcaactgcctgaccattatcaactaatccttcatttgctggattatctactgtatctggggctgcagttgagttggtattgtagctgctactgcttccttgactattgccctcataattatccgatgattgactgtttccatatgaactattgttagcttgtccatagctagatgattgaccctgactagtatttgaactattaccttggttatttgtttgaccattgctagttgaagtattagtaccgtaaccgttactttgagattgtccagtagcagtgttggtactatcaggctgtccggttgaattactgttactctgtgcagagttactactttgattttctgacaaaccagtagcggtattttgtgattgagcatcactagtactgagtcccgtattattagatgcactattattagtactattagcaaagcttcccatttgtgatgaatcagtgttgttagtatcagataaaccagtagctttatcagttccatgagattgagaactattgttggtaattccgtgagcattgctcttatttaacataccaccaagcatcgagacacttttacctgcgccacgcattgcaaatccaccaacagcaccggccattgcaccagttgccattaattgcccggcttcttcactaagtccctgagatactccggtaactcgttcaaaataagaaatcccagcaaaagaagcataaccaccagctgcatagataatcgcaatcgctagactacgctcgatccagctcaaattatctggcagcttacttggagctacattaataaagataaaataaactttaataatcaaaaccaatagtactaatgacaggaaccatccaaccactgaactaagaaaatctcgccatttttttgaactccgaacactctgtgctgcaataaacggtgctgccaaattcattaaagaaagttcaaaaatatctttagctaccctaaatgaagctacgatgagcacaattcctaaaataagagactgaccaattaagccaagccagttaacagaatatcgcgaatagtagctgttcatccatttagcaaatttatggtaatcattcttttcaatcgaatagccaccatcggtttgttcatgttcatcaactaaatggtaattcataacggtctcagcatctttatgctttttatccaatcctaatcctttcatagttggttcatccataaagtcaccaaggtccatgttctcaatatcatcatcattatctaaaacgttccagttggcaacgtttttaattttgctagaatctggcttgtactgataattcccccaatctttccgaattaacgtgcttaaatcaattacattatttttgattggttgcacagctaaatcttcactcatacctttattactagcacgattaatatctgaacgcgcgctaatagcaatatctccgaatccagggattgtactactgccaccagctacacgcatcatcattggtaagatagtcaacgtaattgaaaccatgacaatatttggcaaaattttgctccactttgaagcatgtcccattgtttgcatggctactaaaatgattgccaagactaataatgaccatccaattgccgaaacgacaacatacagaccatgcaacggagatctggggcttgataaggttccatcccagcctaataagccaaacatagcatcaaatatcttttcaaaactctcattgatatgaaaaatagtttgaactatcacattttgaaagaaaccagcaacagcatgcaaagtcccccaggataaatgaagataatttcgccaatcttcataaaagcgaattattttcccagtatcaccatctggaatactagaatacggtccaccactaaccgcttgatctaaactacttgaattgatcgctagtaatgataagcataaattcttaatcaatatccacatctattacgcccccttcttaaattgattaataaagtcaatagcattttcatataaagctgaatttccttgaaatagatcttctagttcagtgtaactattatgatttttccaataattataagtgtcctgaaataaccccattgcaacctcttttggttggacactatggactaggctataaatgttgctgctaagacttcttaagcgttcatgatcatttagttccgtatcagtaaaaattaggtcatttgaatctgcatgcgagattacatcatcattaacctcagtaggaatactatcgttaaactgagcttcaaagtctttcataaaactgccgctaactgattcctgtggattaccgcttaaatctaaaatttgtttataggcgagatcataattaattcgcttctcttttaaatctaatcgtcgatgcaaagaaacaattctgatatctgacaaggtagtttgatcgttgaattctttctgtaagaaggtatttcgatatggcatcttagtctttccatgatcaaaaatcggtttggctgaaattgaattaccacgttgatctattcgataaactgatcgtaacactaccatttcaccacccatgaattgcattaattcaggaaccgataaaatatcttgactaattaactgactattaacactagcactgtgccagtttccaacttggccattaatattttcaacagagactgtccgcttcccaattcgtttagaaatactttcagcagttgtcgttgaattggtcaaaatatataaaatattagaacagttgctttcaatggttttagcttcctgttcgttataatgaatttgtaactgttctagattttgtacgacaatatcaaacatcatattaaaacctaaacaaatcgaaattttcttagtcatatcccgaatggtcggcaattcagcaaactcatctaaaataaaatggacgcgacgaaatagctttcgcccattgctttcagccattccatataaaatattgaaggcttggtcaattgcaaacgccggtaattgattatatgttgagttattaggcggcgtgaccaagaataaagcaacaggtgcttctgaatatttaagccttgtctctgattctataagttccccagaaagttgattgcttgtcactttaagtgaaacatccttaagaatcggcttcttagtataagggtctaatttaaactttctccctaatccttgtttagcataatttttgtgaccttgaagtacaacttcttggtcaagcacatctgctgaattttttcgataattgaaactgattttaagtagaaaatcatctggcaaagtagtcttaattgcatattgaagattcccgaccttatcaattagctgtgtacgcttttccaacttatttccatgaagatcatcaaattcaacaactgcagtcttaaactgatatttcggatcagaaaattttactttaagcgttctagggaaaccaagcttagtaaaatcaagcgaattcaaagaagtcattttagcaatatcggattgctgatagattttgattccttccattgcactggagtaaatattcccagaagtttcatcaccggcaaatttactttgagcaaacgcatctaaagccatttgcctaaatttgctatagttcttttcgttgagcttttgcaatttagcaaaataaactaataatttattcttttgcgattttggctcattgtcttctggcatttctaaaagtccactatctacttcatcatcagtaggaataatatctccagatgaatttagtaaaacttctttagaacctaattctgtcatcatatgaaggacattatccatcgtgacttcagcccagttattattgcgtttagcatgatcaacaactgccaaaattaaagcatttagtaaattaatcgatgaattttgccaaaatttatctttggcattcggatctacataaatacttgaagaaaggctatttaccgcttgctgggtctcgtcatagtagccgtctttagcataatcaataatctgttgtaatgggttataactcattgaaaaatcaggattctgaatgttaagaacttcaacctcatagcctcgtttacgtaaggtctcataagacatttgataaagttcccctttggagtcattaaccaccattgaagactttttttgtgcgcgtgacaaaatatcgatcaatggcataacttccgtttcccctttaccagaacgagagataccaattaatagactattaatagttgtttgatcaattgagtaaaaacctttagctggttcaacaaatttcactttcccttttaagccaggaaaagcagataataattgtaaaagcttaggacacagataataacttgtgtaaagccctggatggtacttaataaattcagagtttggtgtaatatgtgcaactgggattccaccatagcctgggaaagaagcgccccgatctgcaatctgtggatattgccgaagtatttccttttctgtcgctaaacgatcgtttccatattgtgaatgtttagttggcttccagcgaattctcatcttaataatcatcggaaccaggatcaaactgaagaaaagttcaattccccagaaaaagccaggtgcttgatgcattactcgatagtttcctaaattactaaactcccagccggccaccactgaacgaaaagagtcttgagggataattccattgagaatctgtgctaaaaactgtccggaggctggcgaagttacccaataatacgaagcactaattccactggctaaccagcaaaccacatagctcactacaatagagtaaataagccatattccaattagaaatatcggtgatcctaaaactttctgatcctgtccgtctttacgatgacgttcacgatcataattttttgccatgacctaacttcctttcatttaaattccatcacagcataaaaaagttacagaaatgtttaagtttcgccaaaaaaagccaaccattttaccggttgactcacgttttacttctttcttgtttttaggccaacataagctccaattgcacctgctagaattaccaccccagtaacagtcaagtaaaatgctagtgaagcctctgtactaccatttggattcatatttggagcagtactaagattattagctttattttcggaactcacagcactgctactagcattagaactactatcagttttatcacttgtagttgcagtcgaattactgctagatgcagcagcaatcatattagatgtatcactagcattattcttggccatatcttgaagctcttctaatgtaattccttcaatagttgcaatcgtttctcctttagaattaagtaatgtaatttttagcggatctgtcatcaatgttttgttacttagcgcagttgagctaagattaactttaaaactgatattgtcattttttcgttgtattttcccagaatcaacagtttgatgttcctgggagccatcgctatcagcatcaatatcagttgctacaaaattaagcttttgatcatttccctttaccttatttgccggtaactcaatcttaattatctgtgaaccatcgtcattgttagttaccgtagcattaagattggtgtccttagtcttataagtatctggtgaagtaatttgaactgtattattaatatcttctgcgtgaacagcaattggagtagctgaaattcctaggcctaagatacttgtggcaagaagtgtattgagccataaacgtttaccaacagaattttgagtgatcttcttttccataccaaaaaccttcctgttattttattcaaaagtttactttgaaaaatgccggtataatcgcctcctttatccgacaccctaattaaaaaggactaatttatttctttaactttcgccaaaagaaaaagccagcacataggctgaccttagtgaaatagatttatttattggcttgagcaaccttatcagctagttgattattattagctttcattaataagctctgtgcctggctagcacggtagcgatcattcatattcaagttgttcattttttgaataacatcgtttgcctgtttcggatcattagcaatgatagccttgtccaagttatagtaagtctcagtcttgtacttatctaactcattggcattgttgctatgtaatgcagcaactgctttagaattaatttgatcttgtgatactgtacttaatctttttgccgctgcaacccgatcatgcatttgttgttgaagctgtgcaacttcttgttgatgttggtggttttgatataccgtatatccagcaacgccaactacaattaataatagggccactacaaatcctattaccatccgttttacgcccttaaccatactagcaacttgattatctactttttcttctgattcagctgttgtttgtgctgaaggactagtttgcggggtctgaatcgtcactgattgtggttggttcattttttgtaaactttgtgccaaaactaactgcataatatcattaacgtttttactattttctttgttactctgttctattcgtttattagtattttcctgttttaaaaggtcaatttcttttcgcaacgattcaatcttattatcacgagactgtaactcatgttttaagttaataacgtctttattattagcatttcttgcagcttccgaagtacttaaacgggcagtcaaatctgagattgtcttatctttttgttccagtttttcatgcggatattcgactcgactcaactcagcctgtgaacgattatgagcaataattgtttgccgtgcattcatatcttcattggtaacgttagttcgagtactatcaagttccttactgcatttctttagcaattcttgtaatacttctgtcgcgtgagcctgaacttgactagcatcttcttgagcttgaatctcataatggcgatttaattccgcttctaacttcttttcattttcgttaacttgtttttcgtgatctttccaagctcgatcatagcgatctagggccttgccattatattccttatctaattcttgttgggccatctttttctgtgttctagctgattcgtcaatttgttctaaagtcttttcataacttcttttagcctcagctttatcgacatttgcttgattatcaatttctttatttttctttgtaagggcttggttataatcattctgaatacttttttctacttcatcatgaatggttgctgcgtcattagcatgaagtttattgtattcagctaatttttcttgaatattttgtgcatagatatttctgcgacctagtagatatttttcatttgagctattgagtttattagctgcttgctctagcaccttgtttaaggtttttttcttttgatttacttgatattcaacatagcccttatgacctggttctaccggatctagaacttcaacagcaaactttggtgcttcaacgtaccctttattgcgaacgtcttcaatcgttttagtgactttttcttcaacgctatgtttctctttccgagaattatacgtatccatcttctttgcgcttggcttatcgttatgattttgaattacttgttcttttggattagacttctttatcataacggtctgtgaagtgttctccggataactattagattggtcaccttgattagagttagttgtttgtgaaaccttttgattattattcataggcactgcttcagaaaattttcctgagactggatcatatacaggcgctttacttgcactatcattttctgttttttcaatattctcaagcgctggaattgaaagagttactctacctttttgtgtatcttcttcagttggcaaaatagcaatgttatcgtcagtagttcctgtggaatcttgataagctgttttcaattcctcacaataatttatcttctcatcataatcgacatctgaattagagggatcattaaaaatttcttcaaagatactcttagtcaagttctggtagtcataatcaatactaaaattacttaaagtaataaattcatgaggattcccatccactgatccttttttccctatttttgctttttgtgttttatcaaattcccaaatggcaaaatatgaaaacgtaacaggcttagctgttgttgcagcaagagtccgtaattcatcaaataaatcttcagctgttttaaaggtagcgaatggtaaagtttgatttaatggagcgacattttcattttcttcactctcggatacctgctcaataatttttcgaatttcatcattattttctggtgcaaactcatcatcaaattctaagcgaacggtgtatggatcatccagcataaattgatttttcttttttaatttcccgaaatgtcaatttaagttagaaagaaagtagttgctcatcagtgacgtaggacatgaatacctcatatggagttcgatagcctagtgatttgcggggcaggttatttcgcttactcatcagttgggtcaccaattcatcaggaagattgcggaaatctagctgttttgttaagccgtcccggcgtaaaagaccgttgttgttttcgttcagccctcgttgattgggagcaccaacctcggcaaagtaagtgtgaaggtcaaattgattggcaatctcgcgccagccggcgaattcttttccgttgtcaaaggtaatcgatttgaagaagtgctgcgggaatttccgaagccactgacctaagtgttggttaatcgcatcagccgtcttttcgtgcacattgagtacaatttcgaccttcgattggcgttcggtcagggtcattaccgccccttggtgctttttgccttggacggtatcagcttcaaggtgtccaaattcagtggcatagtgcggaaagtccttggcacgctcgtgaatacttcgccccaattggccagccttcccgcggcgctcaatatagccattcgggtgccgcttacctcgcatgggcaaagcacggacatccaaaccgaactgcccccgttcaaacatccggtaaagagttcgccggttacaactaattgggcgctcagcgcgcccaataatggtgtcaggcgtccacccctgggcaattttgtcgttgatataagtaagttcagccagtgacaactgagtacgttttcggccacaacgttgcttattgcgcatatagtgatcttgataatcagcaattgaggcaccggtttccaggtaacgataaacgcgataaacggtttcggcgctacggttgatcatttgggccactcggtacgctttaagcttttgcacgaaagaatgggcgatgattgtcagctcgtttgtggtaagatgggtgtaagtcatttgtggtttcctttcttttgtttaggggtattcaaaagtctaccacaaatggcttttctatttttctaacttaattttacaaacggcgtttcttaaaaaatcccattatttttactccttcatcgaattaatttacattcttaaatttatctgctatttttcattacacaactttcgccaaaataaaaaaagacgccatgaatttcttcatgacgcaaagcataatggcaagcgattaagcaccaaatgattgactagtataattcttcaaaaattcaacaataacaaaggcaatcaaccctacaactagtccaacagcagccttttgccacttctttttaccagaccgtgcactttcttccccacctgatgtgtagagaattgctccccaaacaacgataaatacagcatatgctgcaagaatgaccattaggccccgtgacaatttattaagtaaacttgaggtaccaccaattggatcagcaccaagagttaactcattcattgctttggcatatgcggttgggaaattagtcattaaaaacttatccatcaaaccgaataacctccttaaaattaagatgtcatcaatgattgttgatgatcagtcatcagtttaaggaggtttttaatttatttaactttcgccaaaacttactttttctggtcagattcaataattttatcttgattattttgatctaaaaaatttgtagttggaattctttctttagcaacttggaagaattcatctagttttttaacactatctaattgccaatatttcataagtttagttgcaaattcgtttagttgcttatccgtctcttctttttgtaaatcacgcagttcacttttttccttagctaatttctttgctagttctttgatgtaattttgctttttagctgttttttcagtttctaacgttaattctttctttcgagccattaaaaattcgtctccaatttctgttatttactatctggaatcaatccaaaattgattttgcgaccgtttttattatgatgttgcaatttactacgttcaaattggtcacgaggatcataaaccttagcactaattttgtggtaggtattatcagatttattttctaattgcaaaataatcattgaaagtggcgctgttacttcattttcaattgttctttcaagcggtcttgcaccatttttaacatccgttccaatatcagctaggtactcaattaggtcattgccataagcaaattgaaagccatgttctttcaagcggtcatttaatatttgtaagtcattttgagcaatttgcttaataactggccggggaagcatattaaatacaattttatgttcaatccgatttacaaattccggacgaaaaatattagttagttccatattgactaacttcttaaatgcagtatgcctccgaatccgttgacgttcactctggtcaatttcgttcccttcaatcgttttctcacttgattggcggtcattgattagttcagctgcaatattggttgtcataatgataatgacatttctaaaatcagttgatcttccaaaccgatcccgtaattcaccagcatccaggatttgtaataggcgatcatgaactgctgaacatgctttttcaatttcatctagcaataaaatacaataaggtctgtgttttatttgatccgttaatagaatttgaaaatgatttagggaatcgcgctcactaaattcagacatatcaaacctcactaaggcgttttcgctatcaaacataaccttagctaattgcttagaaagtgctgtctttccagttccagtcgttcccaagaataaaaaggacgctaatggccgattaggtgcttgcaaccctgctttggcaattgtaatcacattagctactgattgaattgcttcctcctgtcctttaactaccttactaagtttatctttgatattacgtaaacgacttgtatcattacgcaaaacattagtaatgggaattcctttcatttcctgcagtactaatgctacttgtttaatatccacatcaaccacatgattagtagcagcaattgcgccagcttgatcaatcaagtcaattgccttatctggtaaatagcgatctgcaatataacgaactgataaatcaaccgccccagcgatcgcagaatcatcataatgaacgtgatgataatcttcatagtttttcttaattccattaagaatcttgattgatgtattccgagaaggttcttctacttttacttgttgaaaccgcctttgtaatgctggatcacgctcaatgaactttttatattcatcaattgttgttgagccaattaattgaatatctccgcgagccattgctggttttaacacatctcctaagtccatggctcctcccgtttgatcagcacccataattgtatgaatttcatcaataaaaaggatattttccccattagtttgtttaaattcattaatgatattcaacattttcattactgtatcttgttgtcccagcgctgcaatctgaagaactcgaatatgttttccttccagttgtttaccagctttatgtaaagcaattaatcgagctaatccttcaataatagctgtcttccctacaccggcttcaccaatcaagattgggttattcttagtctttcgattaagattaataatgacttgcttaatttcctggtttcgagcaacagctttatactcatctggattcttagctgccgctacggttaaatcatccgtatatctatcaatattaggtgtcttttttaattcttcagtcaattactaacaccccttactatggctgacttaataacacagcttctaacaggctatcagtcttctttagaattttttcatggttctctattccatatagatacgctttaattttgccgtgattcttctcaaaagttacaatgatctgtttagtaataaatggattatcaattaaccattcttcttgattaatttgattactaacaaaccaaaatgaactatcaagacccgccttttttaattcgctatcaagttcgtaaaatcgcaagcggcttagattactctttggccatagctgcttgctccagcctattggcgttcttattttagtatctaaaacattcaataacgcttcttcactccagcgaaatgcattgactcgtgagtactgattaattcgctctgcagtttccgctaaatattctttttctaactccatcacaattccttttccttcttagtattacaaactaaggccttcatcatcatctcggccgccaaaataatcattaatatctatatcatctgctggttgatcagtatcatcatggcctttagcctgttcagcctgctgataagactcatcaatttgcgagctgtcgcctaaatcaaccgtctcctcttctggagccgttttggttgctgtaggtttttttaactggaaatcacctttatcaggagtagttatatcgtagttattgatattaattgttgaatcaagatcctcgtcactttctggctcatactgcgaaacaagatcattcatgctagtttccgtttcattatcatctttttttacgtttcttaatttaattggtggctctgactctgattcttgctggtcattattattgcttgacgaattttccgagctggtttgagccggttgcgttgtcttaccaacttctaatactcgtaatttttcttgtagtttatcctgtaattttttagctgactctattttctcatgcaattttcgattttctgatttgagcttttcaataggttcgaaatagtcaccttttgatagataaagcatactattaatttcttttgcatctttcagcttaaagattatacaattcagttctttgataatgacctcgtctaaagttaatgcccaagtcgaatttaattgcgctgaatgcgcaaagaacttttcatattgattgtcactaactaatatctttaattgagatccactattactttcacattcaaaatctaatagcacatcattaccctcaatttcttgagactttagtattcctgtaattttcatcatttttatttacctcgctttttaaaatccggtataaagccaataaattcccgtcccttatattcacttgggccaagttgaccactcaaattacctttcttatatttgaaagtaattattttcccagcagataaatcctcaagttcctgatctgtaaaagtatgagtaccccacttacgactgatctgaaccgcttttccttggaattgaaccatcactttctctttcttttcatacttaactttctttggtgcccctagaatatcttttaaatgcttagcgtttcgctgcataattggaatatcatgcttaataacctgagttactgtatttaggactttatttgggtccatttcaaatttagcaactacattcattgcatcaaataactgtgcggtgattttaggtgaagcaatataagtgttatagccaattaaagccgacattaatccagtatccgttagatttaacttagctccttttgctttcaacaggccattattgctagtaattgcagccaaagtactttgttgagttgctggcgttccaatcccatattttccataagtagaaagtctacgatatagccattttttggttggccaagcaggcttaggattggctccttcatcaataaatgtaattgcgctgctgccaattggttgttgttgcttggataaattatcttcactatagataagacgataattatactcgactggctgattaaagtgcgttacaaagtccggataattaactacgcatgcttcataagaatcataaacataatcttctgcaagaatggataaggcactagcggctactaatttataaatatctaccgcacaatcttgtgctttttcacttttaccagagactgccttctttagctcctccattgtttcaggaatcttttcaccaggccgattagccccatgagtcgctgagtctttaacaaatttttctcttggttgtcggtgtgttaaaagcgattgatcgacgttaattacagctgcgatttgatcagcattattcatcaactcaataaactggtcattagtaatcaccttgtctcctgttcgcggataagatagataatgtttttcataaagttcttggtaaacttcttcgaccattgcagaagaatacccctttgctgccattgcactatcaattccggtcatatcaattaatgtattagggacctgtttttttcgtgtacaacttaataatttgacttctgcgggcgatgagtaagtgctttgttcttgtttcgctagtttaatatcagcatgacgaatctttttaattagttcttcgtcttcttttcttactttgcgagcatagacatggccattattatccttaaatttaacttcgtagtaaggctttttttgataatgcttgattcgctgcagttgatcaaaagtaaaagcaagcattactgactttaatcgtccttgattaataacttttacccgataaccttcactacgagctaatgttgtagaaacccttgttgcttgcatagacgcaaaatcccatcgctgccgtaaaaccgctttaatgtagtcaccatcttttttctgactagaaatatctcgtaaattccttaatgctttttgaattccctttttactttcatcatcatgatattcacgataaactggtcctcgccaattgatagcattaataatttcccaagcaagaagttcaccttctccgcttggatcattatcagttgcaataacaattgcttgtgcttgacgactctcattagcaatttttttaatcattttctgtgctgatccatttttcgctttttttcgccatgttaaatcttgtaagttccagggcaaatcttttaactcccaagattcatatttatctttcaagtttggtgcaacttgatctactggatctaagaattctagtaggtgcccttgagcatgagttagttgatatgtatggccattaactgttcctgtttctccaccaagagcagcgacaaagttatcaaatgctgatttcttttcggttaagattaaataatcaaacataatttcacctgattttcttatttcaactgaatttaagatacagtagctattgatttaccaaagtttcgcctaatttcgtccaaatttggacaaagtaaaaacgccatgaattttttcttcatgacgtgatcatttgaactttaacgttcttttcgcttatcttcaaaatgttgtttaaaactagctttttgtggatttactttattggttattgctttactgtttcccatattaccagctagcatttcatccataatttgtcgaatccgttttactcctaattctttagtcttacgattagcaaagtcgtgcatggactcagcatagtattgcttgtcattaagtttcaaggcatcgttccaatctttattattgctgttgggctgatctactataattttcatattatcccaaccttgttcttttctaagtgtttcaagcctcccattaatgcgtataatacccttcaatcctgctgtatcagtatctaacgctaaatgaatttcatctggaacaccaaatttagttatgtaattactaacggtatttaccttggtagcagcaccattaagcgatagaaaagttttagcacctggttggttaccatgcatttgaaaataggacagcatatcaattgggctttcaaaaatatatagctttttagtgtcatcgttttttgaattggcattaaaacgaaagccaaattccctagcagaaccttttgcaatcattttaatggtgccacgtttcccaaatcttttatgatcaactatcgttccctgcacatcaccaccaatttctttcatatttttatctctccaggaaaagaatgcactaccgttacgtaattgcctaattaagccatgtttaatgagaacttgaatcaagcgctcgtctaacttacgagttttagtgaaatagttaatcatttgttgattttgccgactacctggccacttttctggttggtattcaactacctgataatggtgttgtggtgcctttgctaattctggagctagtttttctaattgatctagtgctattttcttttctagtccttcatatgatcttaaaaaattatacagatttcctccaacgccttgcgaattccaatagaaagtctcgtatggcttctgtgaggttattcttgtatcgacaactagcgaatcatgatcagttagtcttaaataatagccttgtttttcataaggaattcctttaatatctaaatatttctgaatagattgccgacacaatttatctacgtttgataatttctcttctgtaactgcagccattgttgatcacctctccacccgcattagccgttgcttttggagaagctgattaagtttatcaggacgaaatcccgaccattcttctgtatctgtaatgactacaggcaccttaagatgccccttatcatgaagactcttagcatactgaggactttgagaaagatcaatatcgataaatttgatgtggtgaacgataaaaaaatgcgtagtcattagacaagctttacaattaggcttatagaaaactcgaatcatgggttatcactccttaactttttcttcaaaagtaaattggaatgagctttttagtatctttcgccacactttaactggtgtaaactttgtatttacataaatgtaaataaagtgtaaaatagaggcaacaaataaatagaagggcggttacatcaatgttaaatttatataacagaactattggcagaatagataaaggttatattttttctcactatctatcagtttattttgttatctttattctttataactttactgataaaaaagatggtatcttttgtttaattctatgtgttctagcccttttttaccctttcgccacatttggatgggattatttattccaaaattttaactccaacgtattcttttttactggctttacttttattctttggattttctggaagattagtaaatttttctttctactagccttcgcaccattaatcgctattgtagttttattctttatctatctttcaggaaaataaaaaagcgacagtaaccaaataccaccgctgaaaaagctatttgaatagtcgcatagcttttttaattaactttttaatgtgcttattagacacaaatgcgtcataaggagttgcctcctctctgcactagtcaggtttcctacgcctgctcaaatgtgcctagttattgggccatacttattttgtgttataatatagttactaatatgataaggccgtgtgttgtgggtgctttctagctcacaagtagtcggttgagagggcgtcctaataggcgctctttttttatttattgtctgaaaattaaatttaagaaaattatgtacaaattcacagtaacttaatttacttaattgttttcattacctgttaagaattcgttgcctttgccgttgttgaaatcctctagcaataattaatcttttaaccttctcatttggattaggctctaacgctaaggcttctatgcaagcacattgttgttctaatggcagtttagcttctaaagctaaccaagtagcagtgtctctattcattccggcttgactgaattttaattgggttaatgataattgatcaattgtgtttttcataatcttctccaaaaagtgattcctgataactaatcttcttattctttttgctaaatgtattcctaattaagtcaattgctgtttgataatacatccactgagttatttctttacttgaataacgcgatttactagaaacccaccggccatattgattacatgatgttttagattttatttttaacttattagcaattcgtccgatcatattaggagtagtcccaatcatttttgctacctcactagcgctgtattccttttgctgagtaattgacatgaccattgtttcattataaataaggcctggcgttgaaatatcaatttctttaatcgaatagttgcttttatcccttgtctcaagtcctaattcttcaaggagatagtctattgcatccgtttgagaataggcagttactaagtaatataacttattatctgagattcgataaagttttaggctaaattctcttttatccatttttaatcccgtccaatatcaaaattgctctatatattaaaatccactattacactaaaggagaaaaaaagaagtttcgccattgacactgttcacgcaaaaaggcccagcaaactgctgagcctttttactttaaaggagatatgaaatttttatgtgtaaaacaaactaattaatttcgctttttcttaagactaaatgcgcctagacttactaggaatccagctaatccagctgcaactaatccactttcatttgcattaccagtttgtggcaatgcttcttgaggagccgcagaacttgattgttgtggtgctggagtggcaacttgagcaggagttgctactgcagccataaccggttcttgtactggcgttacttgtggagcaggagttggtgttggggttgtctttggtgtttcagttggcgtaactggagtttccggcgtcttaggtgtagtagatggtgtttctggcttcttaggttcttccgtttccgtagttgttgtaacagtattagaactaaagtcaatgttgttaattgagtttgtgtacttgttttgtactgttccactctttactcgcttcatcttaagataagctgttgctccaaacgatgacttagaaagatcaacgcttgccaagaagtttttatcaaattcaatatcaactttaccattttctgtatcaacaacttgtgttgtgtattttgtaacatcggtattcttcttaagcacagttccatcttttaacgtaatatcatcatttaagaggactgtataacccgcattatattgatcatgcgtttcatcataatcatcgtgaaaaccatattcattaagcgctgttacactagccggcaattgtgacccaaccaacttataatcaaaacgttggcctaactcaatcttttggccattgagacccttttgattatcaacactaattactacatccttcgttggatttggtaagaaggtttcaatccaaggagtattagtcttaaccgtatgattattgattgtcgatgatccagcattctcaagtttagtaccagatggaacatccttgtgaatgttaaatgttaatagcaattgtgcattaccgcctggtgtctttgcagggtctttccgcgttgcgataacaaaaccgtcacctttttcaaggttatactcactagttgctaacttaccattctcaaggacttgaacatcagtaagatcaacatccttagcgaatttcgaataatcatctttgattgacatattagtaagtggatcagttaattgtgatgggtccggtaaggtagtagtgaccttagcatgtgctacggatccatcaataactacccggccatcaacaatttgatcatcttctacccaatgtttttcagcttcttgggtataggtagtaattgatggtgtattagttggaattgtctcatcgttaattgttccggaaccgtgattttcaagaacagtaccattaggaatatcacccttgatcttgtagtcaaccttcattgaaacttggccaccattaagattttcagtgtcattccgagttgctgttacatgaccagcaccatcatctgaaacagtgtagttagcagtggcttctttaccatcttcataaacatgaacagctcctggttgggcatatttgctgaagttagtataatcgtcggttactgctaccttatttaccccttcgctagtttctggaagttgcatatcaacttgtgaattgatcttgccattagctgaagatacatgagtttgaataaaggaagcattgaataatccggccctagcggcaaaaaggttattgtttaagttaccagttgctttagtgactaaattattagtatctaaggaatccttagcattcattactgcctgcatagtaactggcaattcaccttgatgattattaaccttagatgggtccttgcgggttgcaacaaccttaccatttggatcaatagaaatatcatactgatcagttacatctttatcaccttcaaagacatggactccttgcacttcaacatctttagcaaacttagagaagtcatcggttaattgaattttatgaatcttactaccaagagttgaggacttaggaagggtcatatcaacacgagcagtaacaactccatcattgattgcaagcttattatcaactacttggccaccattattaacccaatgcttatctgtatcttgagtataagtcttaatttgacgatcaggggttggaaccaggtcatcattaatttgaccagaacccttgttagtaagaactgttccagttggaacgtccttatgcaaagtccattgcgcccgtagaattacgattccgcctggcgtcgttgcaggatctttccgcgttgcaatgatttgatgatccttagtcacttcaaagttataaagatcattagcatcttttccgttttcggtaatggaataccccttaagatcaaccttatccgcaaagtccgcaaagttatcaattacttgaaccttcttgagcttttcagccaagttctgtggctctggcaacgacattgaaaccttactgcttacattatcaccagctatgaagaccatattatcaacagattgatcattatcattggtccaatgtttatcggtttctggagtaaaagtaactacatctggtgtattagtcttaacgcggctgcggttaataattccggtacctttgttagtgaatttagttcccgaagccacatcgtgattaactttccaagtaacgttcatggttaaggtacctgcaggcaccttagatggatccttacgaacagcagtaatcacgccatcctttaaggttacattatattcggtactagcatcttgaccattttcataaagtttaactgttggtagtccaactttatccttgaagtcactgtaatcatcttcaattgctacatcttctaatgattttgctaagctattaggctctggtaatgacatcgaaatttctgaatgaattacatcatcattaataacagtcttactgtcaacatcttggtctccagctttccagtgcttttctgctgtttgtgtaaagacataaatgttacgatcgggtgttggaactagatcatcattaatctgtcctgaaccacggttagtcaagaccgtaccgttagggatagcagtattaagtttccagttagctttcagataaactaccccacccggtgctgagctagcatctttgcgagtagcagtaacaattccattttcattcttaacatcatagagtgaagttacgtctttatcgccttcgtagacattagcaccctcataggtaaccttatccataaagttacgataatcatcaataacgataatcttagaaagtggtttagctaactgctctggttctggcagtgtcattgagacattcccatgcacttcatcaccagcaacataagtcttatcatcaacgtcttgattaccctcaacccaatgcttatctgtctttggggtaaaggtaacagtgtcgacagtaggaacgtctacacgactcttattgatcaaagtgtaaccagtattgcttagtttagtaccactggcaacatcatgattgatcttccagtcaaccaatagtttagcaatgccacctggtgctgagctagcatctttgcgagtagcagtaacaaaaccgttattatcaactactacgttatattgatcagttgcatccttatcattttcagttacacgataactagtaaccttagccttgtctttgaagtcagaccaatcatcaactaattgaatttcgccaagctttttagctaattggcttggatctggtaaagcggtagagatttcagcatgaatcaaatcatcattaatctgagttaagccatcaaccttgcggtttccttcaacccagtgcttatcactatcattatggaaagtatagattgttcggtccggtgtatttacagttttaccattaatcgttcctgacccactgttaactaactttgttccactaggtaaaccagtatgagtggtccagataacatttaattgaaccttaccagcaggtgctgcaccagggttcttgcgggttgctgtaactaccccattctcgttaacaatgttatattgatcagttgcatcattatcattttcagttactgttgctgacttgtagtcaacatcattagcaaatttagtgtaatcatcacgaataattacattagataatggtttggctaaatcgcttggatttggcaaggacatagtaacttgaccattaacattgtcaccatcaacgtaagttttatcatcaacaacctgattaccatcaacccagtgtttgtccgtagtttgtgtataaactactacataaggtttgccggcttctactgtatggttgttaattcgactagaacccgtatttactagtttagtaccagaaggaacattatcattaattttccaaactgctactaggcgtaaagtgccacctggcgctttgcttggatcgtttcgccgtgccgttaagtgtccattgttatctgttaccgtgtattcactagtaacgttgctgttgccttcccatacttggtaactttgtaatttagctttatccataaagttagtgtaatcatcatcgattgacaggtatgttaatggtttagctaaactattagggtcaggtaaagtagttgtaatgtttgtagttgctacatcatctgcaatataggtcttagtatcaacggtattggaaccttctacccaatgcttatcaacgctttgcgtaaaggtaacaattgctggcgtattagtctcaactgtatgattgtttagccggccagatcctcgatttactaacttagtaccattaggaacattatcattaatcttgaatgttccgattaaaacaacttctcctgctggagctgctgaagcattcttgcggacagccgttaaatgaccattttcgttagtaatattatattgatcagttacattagcaccattttcccataattgataagaaagaagatttgtcttatcagcaaaatcagtatagttatcgtcaattgacacataacttaatggtgcaattaaagtactttggtctggcaaagtcatatgaacttgagtagtaacaatatcaccgttaatttcagttttatcatcgacaatattcttgccttccatccagtgttttactgtttcttgttcataggttttaatttgtgcatcattcgttggtacagtttgatcattgatagttccggatcctgaattttcaaagacagttccagttttaacatttggcttaatcttaaagtcaattactaaggaaactttaccaccattagcagattcagggttctttcgtgtagccgtaacctgttggccattattagtaatatcataattacctgtcgcaagttcttcattctcgtaaacttgtgctccagcatagtcaacattattagcaaatttggaataatcgtcagtaaccttaagactatgcaaaccaccttcaatctgatttgaaccaagataattcatatcaactttggtagttaccacatcgtcattgattcctaccttgttgttaacgctttgaataccattaacccagttcttttcaggcgtagtcttaacatttaagtcatgaagttggtaattgactggttgatcaccaattgtagtcttaggtaccatcactgggttgtagtgatagttggctgaagtggtatttagtttgggtaacgtaacagtagccaccggtgcagtttcaccccattcggcccacgctgggtctccataccttggataatcatgctgaatgcttgttccagaacgatcataaattgtgattaagctccaagttccgtctggattctgtatagcatcataactgccatgataatccttaatagcctttacttcttcctgcgtcttattattgtgcgcgtagaaggcaagtgatcctgggaaatatttctcctttaacgagtttccgtctacaccagttgcatctccttgtttcccaaaaggccatcttgttggatctttaactggtgcaggatcaattgcacgtttaatgacataagtgtcccagaagccgccacctgttttaggtgctaatcctgatggaatcgttaagtgaacgttagttacgacaactttcttacgctgtaagtcgtagtgccatgtaatatcataagttggatgagcattcatgtatccaccattatcccaattaacttgccctgtaacgtgttgatcttttgctaaatcatttaattgagattggtatttagcatagttttgtttctgagtatcgatagcattttgaatactctgagcttggtcattattgctttgggtagcattattaaccgcttcttggataccttgtgtatcagaagctttttttacagtggtttgatcttgatcatgtacaacagttaatccggggattgattgtgcctcttttaccttagcatcaagttgggaagtatcccccttagagccgttaaagttattaacattggacacttctgtttgatgctgtcgagtaatcgtttgaatctgttgcgcttgcttagcttcatcattttgaatactctgcttggcagcatcaacttgatcctgatttacagtctgtgtagttgttggttgctgatttacagtcaatccagcttgacgagcttgatcaacagcattattcagttgcgaatgatcaacattaactggctgcgtaattgtgccagcttgtccagatgttccacttgtagtagccgttatcgcattaccaccagtagcagtttgctgtgtgttattagctgttgtggttgtatcagcatgtgctgtctgcaactcacctgcagcaaccatcatacctgccattgataatgtagtaataccagccgttagccataattttccacctttatacatcttgtaatgtgtagatgatttttcgattggaataacttttgatttttgtcttacaatcataaaaaaaatctcctttgcaaattaatttatttttcaaaggagaatttattctatttttctatatttcaaagtttcgccaaaatttagtgttttttcaaactatttaagaaatcattctaaaatcattcgtacaattgccattaaatatttaaattataaagataattaattgagttactcagaaacaaaacaatgatgaatatcagcaagaattaataaaatggaaaaatagtacaccaagtaatccaaatggtgctaatccaaatgaaattgttcaaaatttagttttgcaaaatgaaccaaatgcttcagttgatatatcttcaaaatatctgattacaaaaaatcatgttgctgctgatggcagcaaatatgatacgatagacttttcttctgctggaaataatcagaccggattaatcggtacagtaaccttcactaaccttacacattcgttttatatagacgaaactggtcaaaaacatgccatcgttaaggaagtagtaactttaagtaatggtcaatctattggttcaactgcaaataaaatgttgcaatctgttcatgtattcaataatccagtcaagtttataaattataattctggacagattgatacggatattcagtactatgatgatcagggtaaattaattgatttttcaaaaatcagtgcttacatttcaccaatgtctcttaatggcggtcgttatgactatatggataatggagtagaaaaaatgctggaaatgtttttgaagcgtgccaagttcttgctggtggaaaagcctttgcaatagcaggctcatcagttaagcttcataacggtaacgacttttatgctgattcagataatcaatccaagcagtggggctcaccatataatttagatgaatgggataaaactggttcgccaatgcaatattatggtgctggacttatcaagttaactggtacaacgttatctctacgatggcacgcacatgcaactagtgatttagctcttcaggcatctcgaactaagcgaaaagacggcgttattgatcttaatgctttccctgatagaagtgtttcgggcgcttgggctgaattaacaaccgttattccacaaaacggtagtattccacaacgaaaaactactgaagtacactatcactacaacccatccgctattgacttatattttccgaacaatatagatgatttagtgttttaaaacaaaaagagcgcctattaagcgccccaaccggttcggaataagtaaccaactgattccgttttgcactccggctaatcattctaatataaacattataacatactttttttatggtacaataattaagcactctgagactaccaatctctaattataagtgcaactgggggtgaaccccatgagccatatttggccaatcattctaattgtgcctagtaagcacattaaacatctaattaattggttactcaagtagtaatcttagcgctgactttggttggcgctttttattttgcggtatgaagaaagaaactattctcgtctattgttcgggattataagcgaatgacggatgggttgtagtgatagtgtgtttcggaagtcttacgaattggttgtttaatttgtgtttcaggtaaggttgttccagcagtaaaccaagcattatttaggaactgattattatactgggaagcaatatcagctccaccccatgagactaaaccctgtcgtaaagaaacactagatccagttaattgaaaaacaatcgcaccatagtatgcattaggagatccatccatatcccagccagaaccaccgttatcagtattgataccattattcataccagtaccactataattattgaaaccggcataagcccagccatcatcatgaacactaattgatgatccagctaattgtttaatttgagcaccggaaatcagtttaacgccttcgctaatcccacttgttggattaccttcatttttacctccttgataatcatttccctgatcaaagtttagagatcctactgaaagccatgcattgtttgttccggaaaaatcaatcaagttaccgtttgcatcgtaatactgataagttgctgttacagtagttgaatgcatatctccccgcactgggtcttcgaaaactactaaaaagttatcgttagcaccttctgtaacagcatttaatccgctttgagtaatacgattgccagtaggggtgctgtcagaataagtaactacgattttgctaatttttgatcctttgtatgttgagttttttaagttcgtataggtaactcgtagaaattctccgtcaatattgttgacatatgcattatttttatcaaaaatctgatacccagcatacttagtaccttcttcaactcgtttaaatgtaattcttggatttagtgcttcgatatcaacagttgcattattttccggttttaacgacaaagcttgattaacactgtttgttgtaatgaccggcgcgtttgcgccttgattcagttttgccatttctgcattgtactcgttcattgcattatcgtactcagcattatttcgtttctgagtaagaagccaaaattttacagttttatgtaatctttcctaatttaaaccgaataattactaagttaaattcaaaatggtaaggtattttcccttttggttcgtccaaatttggacaaagtttaagacaatcgaatcatattttctagtattttttgattatctcgcgcttctaactcctttactatgtgtaaataagtttgctgcgtagtgatcgtgtttgaatgacccaatcttttcgccacactaggaattgaaactccatcatagattaataacgaggcatgagtatgccttaacccatgcacagaaataacatcaactccggcttttctacaatatttggtgaggtgattattaatagtggaaatatatattcgcttacctgtttgtagaaaaatgggcttgtcaggatttaaatctttagttagcatttgaaactgttctgatgtaatcgggtctacactgatggttcttactgaagaattatttttagtctcttgaaacttgccatttttggatttgtagtcccatgttttattaatttgcaactgatgattttcaaaatcaaagtctttaactgtaattcctaatgcttctgcatatcgtatccctgtctttgctatcaataagattagccaatctatatttaaatcagcctttaagtccaactggttaactaaacgcttcaagtctaacaaactcaaatatttaattttctttgtttttggacgcttccccttgatcgttaagtgtctagttggatctttcacaagtagtccatcttcaattgcatccatgattgctgctttacaatgatgatgaaatcccttaacggttaggtattcatgagtttcagcatattcattaattaacttctgataattataatgattaatgcttttaactttcatgagtggccaccttttttgtaattctcgatgagttaagtagtacttatctaatgttacttgccgtactgatccttctttatacatatgaatccattctaaataatagtccgtaaataatttatccattattgtaaactcccctttaaactaaaaaaaatctgtgttcctcatcttaacaaggaatacagatttttctttagaaaaccttactttacactatcaaatctcattaaattttaccaaaagcttctatcttatcttttacttggctcttcttttgatcaataaattgattcatatattgccaatctggcactcctttttgaattataggtaaatgaagagtcgatgactttaatttatttttgttaacagcattagcccaattataatagtaactatatgctctaaagatactagctaaaaataaataaacattctcggttgcatactgcttatattcaggttttaatcggataataagattatggctatcattagatacaaagttttgacgttgatatgaaatagagtaagtttttcctccaattagtaaacagtttccttcatcaacgggtaaattgcttgcatcaatataagacacaactccattattcatactacttgctgttatatagggcattgaaccggtaccgaaatcgacttcacgtcttaaaacatttgtagagttatttactgtaaataactctgtaaacttaaagttttcccaattttggctattgatagatgttggttgaatattaatgttattgataatgtttaatttttctaacgccctttgacgtaattcgttaatatatagattcatgtattgccaatctggcttattttgctcatttacaggtaattgaaatgaagtattgttaacaattgaagcagtcataatagtattgaatgttgaccgagtgtgcaattttttcctaactattgttaataaaaataacgcttcattttctgttaattttgatgtatcaatataataaacatcccgtcctgtaacgtaaggttctctttgatagaaaaactctccggtttcaccgccaaagctaatagtatttttaggaataatattaaaatttggcttcttaatgactcttaattttacaccattattaaatttaccacgtgtaatataattaatagtttcacaatcaggatcaatttcagaagctgcctcaacttgtcgtaaatgaagtgtaggagtaccatatgaatttatttctagatctggcaatttaaattctttccaatatctatcattattcaattgattcatttgttactcccttctttattttaatatcaatattttgcttattttctactacttggctctgataaagtacagtttgttttaaagcatcttgcaactttgaactattaatattttgtttaaacatttcatagtccataacagttttcataaagtcctcatcatagatcacaaaaggcttctgagggattggaacgcttaattgtttataattttttaaatcaggtgtaatccattggcaagatttatctgcttgtgtatcacaacgcttaatagttctaacccaaaagtcttcaattgctgaccatcggtgttttatatcttgtcgtccctgattcttaacagtttcaagtccatcctccgcaatctcgcaggtgaatattccatcatcaggatttgttggctgaccagtctcaaatataaaaattgaaactgaaacaccttcactattaaatgtttctttaggtagtttaatgatctttgttaatcgattatgttctagtagatgctttactttctttttcccttctttttcaagtttaaaatcaggcaaaagaattgcagcatcagtattttggggaacattatctaatacattatttaaaatatctaaaggatgatacttatgttcatatggaggattcattaatatcttggttatatggtgaggtttcaattgattatcattctgtattaaatattcatcattatcccgctcaccttcaggatctagccatgaaatattatgaatccattttgctgcttctggggtcattgcgtccacacggttaagattagtcttaccatctttatgaatcatcatattagcacatgctaaggcaaaaatagttttatcaaactcaattccataaagcttttgttgcttgattatttttgcttttttagcatcaggcccaccagcttcagtaatcatattagacattgaattggtaagaaaagttccggaaccgcaggtagcatctagtacagaatcatccatactaacatcaattaaacgatacataaaattagctatatgttgtggtgtaaaaacctgtccattatcacttttagctttatatttattaaattcattaaagaaaatagccattacatcttcaccacgccagtggcttgaatttatagattgactaattttatttatattattaacaaaggttttaatggcttcttgacccgggtcaaaattcgtttgaatatcacgaaaaacctcaattacattattaagttttaaattctgttttagtgaaggttctagacttttattcagcttggataagatagaagtctgtaaaacattataatcatcatcagggtcaagctttgcgccataacgtacggcgactaaagctcccgctgtaaaaatcatgcgatcatataaattacgaatgccaaatttaaaatgcaaagcattattaattctcgccgtcaatgtataaatttcatttacatcaacaggtttatcagtaaagactttaatgtaataatccttattctctaatgttttagataattgagcttcaataaatgtatcgcttcccggatcctcattacgaaaaacacgcacatcctgtccattataagcaatccccattacgtttggatatcttttaagtacaattgacatatttttttgcaactcaggtattgccacatcgtctaagtctttagtactagatttagtttctaaaattaaggccggcttatttttatttttaggtaagtaccatccatcaggcttattattattgctcttccaaggattttgagaaaaacttttacctagtgtattgaaacttgttaattgcccagttccagcaaaagcattagcatcattttcaaaatgtaatatttgctttgcccgatctcgaacttgatcttcggttagtaaagtcattttaagccaccgccctttttaaagcagtagctaaaaatgtaacagctagagggctggcgttaccccccccccatcactttatttatatttttaatgttgttaaacatagttttatgctcctttttaatataactgcttcttatagccattacgcaaaagtaacaattctatactaaaagataattacattttggtcaattcgtacatttactcatgacttcttaaaaaaaagctgtgttttattcatcttgacaaagaaacacagcttttttatcgatactctaagttcactttattcctgaaactgtactaatttgatcatcctttatgagtcttaaatcagtacccttgctcccaataatatgtctaggtactcctcttgataacccataaatatatattcgatccttattttcttttataattttttcatagagagctttacgaatcttcttactatttgcttttccacctggacataatactatctttgaattgctaagatacttagatatatattttgagataaactctatactcttcatatagctttcagcttgaacttgcttcaaatcacttgcttgtaaggttccggttgcacatatatcaagaaaatatatcgatcctaactcgttaaaatcttccaaccttccactatgatttaatgcacgattccatgcagaaccgttagcaacgattttttccaaaggttctttagctttagctcttttcttatataccgctaagggtgatccatttctagctggattcaatccaatgaaaacaatatttcttttcccatttttgatattaatctttgcatatgaataatcatcatcaaacgcttcctctacattaaagattcgacctttaggaaacacgtaggttaaatttctttcttgagcttcttgatgaagtctttttacaacattctcaaattcttcaggggtcatatccataaaacttctccttaaattttagacaaaaaggttcagccaatttggttgaacctttttacataataatacttacattttctaaattagtattcacgtttcttaataccgaacaaactcaacattgctgcaagtgctactccagcaagtgaaagaacagcactatcattattaccagtttgtggtaattgattattgctcttcaattgttgcttgtattgttcgcgggtttgcacagtagtagttgctactggatttgctgattcagttgcagctacagtcttaacactattagcagtaacactagtttgtggttgtacttgacctttactatcaacattgacattggtggttacagaaacagcgggatctacagtagcattagttggactaacaatttggttgcccttaactgtccagccattgacactattacctttagcgtcaacaacttggttattttcgatatggtagccattatctttagcttccttttcagcagctaatttagcttgttcttccgcaacctgcttagcaagtgcttctttttgccgtaattcagttaatgcttgttgtgcttgatccaatacttctttagcagcatcttcattattctttgcttctgcaagagcttgttgtgccttagaaacatttgttgtagtgccagcagcagtctgcttaaggctagttaatttatcattagctacattgtaagcttcttgtgcatcagctaaagccttttgagcagtcgcaacttgttccttagcagcagctaataacttaggagcgttttgtaagtcactaaggttattctgtagttgaactagtttatcattatcaactttaagggtttcattatcattttcaactacttgtttcttttgggctaaattgttattagcatcacttaaagccttattagcattatctaaatcagcttgagcaattgctaaacgtccttgttctgctttaagactatcagtagccttttgaaggtttgcttgctttgttgcaaggtcagcatcaaacgaatcaaaagtagtttgagcttgcttttggttagcttgatcagcacttaattgattttgcagagtagctaaatcattttgagctgtagttaagttgtcattagcctcttgagcagtagctgtcttatctttaacatcattttgagctgctacgagtacttgattagcagaagataaagcattttgagcatcatcattagccttttgctttgatgcttgatcagtttgcttgattgataaatcgtctttggcatcagctaatttttgtgttagtgcattaattgaaggcaatgtataactattttcttcaactttttgatttgcttcaactaaatcatagtgtgtattgtagaacttatctaaagaaaaaccaacagcttgcttttcagctgcaaagttatcaattccagcaaaattagtagcgtgaccccaagctgaatctgcatcatcaaacatcattgaaataaaatcatcataaatcaaatgcttgagatcattaattgtttgtttatttccagttggtaatttggttccatcagtcaatacggtatagtctgttgtaaaaattgactgatccagccccatattttcaccgttccagcttatattaagttgatcagttgcattattgagagcactttgatcatgctttccgttatctgcagaattccaattatctttattataattttgtgatacctgttctgcataatcatctgctgcaggagatgagatcacaagatttgtacccatttgtgtccgaacttgattaataagtgaagcaacaaattggctaagctctgctcgatctgttgaattaagattatcaatatctaccactcgatcatcacttaaattatccttaaatttattctggctcattgcctgatcacgatatttaagaagatcttgcgctaaattattcgcttcatcttgattatagttactattaccaaaatagttatagtatgcaattaagtcatctttgtatccagcaggcaaagtaatagtattaaagtttgctaacttgtcgttgattgcatctaccttagcttgagcgtcctttactgcagtatttgcatcagctaatgctacacttgcctcatcagcaattgcttgcttagcatctttattcttttgtgcagaagtttgcgcatcattggcgttcttcaatgcctcatctgcattcttcttagcttctgctgcattgttaacatcagtttgtttgttgttaacggcagtagtatcatcagcaactttttggttagccttgttcaaagcatcttgggcttcctttttagcctgatcactgttgtcaagaatagcttgagcattcttaactgcatcactagcagtatcaacattcttttgttgattgtcacgagcagtagttgcatcattaactttcttttgcgctgcatcaactgtgctttgtgcatcgctaacggctttgttagcgtcattaatagcatcggtgtctttactaatttgagtttcttgattagcaatagcatcttgtgccttttgaatattagctggtgaagcttgatctgcattttgttgtgcctttgtttcagcatcttgtgcattgcttactgaacttgtagcagcatcgactttagcttgtgcatcattaacaatcgcttgttgactgttaacatcagcttgtgctgcactgttagccgcattagcactatctagttgtgattgggctgcgctagtggcttggctggctgaattaacattactttgtgcttgatcaaccttagcttgtgcttgttggtcagctgtttgtgacgttgctgcagcctgagcattatcagaagttgtatcagctttcacctcatttgttgaagcaactactcctgcagtagcaaccaaactaactcctgctaatgtaacaattttctttttactattcatagtctataatcccccaacttcttaaagtcattgtattaaattatttacgattttattttaacaccatttacgaatttgtaaatactattttgacaaattatcatttaaatttggtttaaatggtaattgcttacttaacgcttttagcagacttgaattttcttcttttaagtcactaataattactgtcgcgattgcttttgtataatctgtaacttcaatattagctacattagactctaaaagcttaatcaattcctgcctggtagtcttaaattgtttatcttcacgctgaactgtatcaagaatatcttgaaatttaacaaccttgtcgtagagcatggccgctttatttacaaacgaactactcattgtttctggatgctgaatgtatttatacaacgttggccgtgaaacatcagttattttagagaactcagtaagagtcatcgctttaccattaagctgtttaagcttgtcgatattctgcaacaagaaaattgccttttgaaaattattcaaattagcctcacctcttattttgatgctacatatattttacactattttacatcaatgtaaagataaatacctaaaaagagtaaaacaaaagacggtagctagttgctatcgcctcatcccactttttgcccttatttaattagaagttccaattaatgcgctgcctatacctacggctcccgtaaaaattataaatgctttaagtatcggtatattaatcatgttccataaaattacaaacaagataattgaaactataataaatactacaataataactaacgagattttcttatgatatgaatggttacttaaacatattaagattatgattacaataataaacgcaagaatcattagagcagcccatattaaatatttaccgcctccttcatcaagaatactttttgatgttcctaaaatatttattttatttacaagagcatctgtaagaccttcgtcttccattcttttgttaaagataccgagaagaattaagtaaattataaacgtaataacatataaaacagaaataattaattcagcaattatttcaggttcatgtaaccaatcatgcgcacgataactattcattttctttttccttaataacttcttttaacactagacagattctgcgtttacgcgagatatttgctatgacaagataaataagtaaagccaagataataatcaaaatggctaccaatataccagatagcagattggccttcattacatattcttttggaatcgtcttaaccgaaattaaccttaatacataaagctctgttgcagtctgaaaccaggctaacacacttttccctagtcctgacagcagtgcggaaaacagtaaccccaaaatagcagtagcagctaattcattccttcttactgaaacttcgtagtcaatcagaataccctttagtttttgcaaagaataaccctcataatcatttttcaggacgtaaaaatactttgcttttcgattatcagagttctgtgggctaaaataagtcaaaagatttagtactgacctaaaaaatactgaacattttcgcgaaccgttcaaaaaaccaccttcgttcctttttagttaaatttaaggacagatctgttcttcactaattatttgatcataaaatattcttagttaaccattccattcagcaatctagtgtttgataatcatcactaatgctataaattccgccaacttcaatattatcagctttctcatctgggataatcactttaactttccgaccactaggaattaaatttacctgcgctaccccataacgaaagtattctacttcagctaattcatcactcatcatataacttcctctgctcttttttcttaattatacttgtttaacgtttaattgtcttggatctgtcaagcggtaaactaatattcttagatattgttggttgaagtttcatccgcaaattcttttcttctttactagctgcttcagttattcgtaaatacataacttttaataactcaggaacacctttatttaataattcacgctcctcgttagtaaagcgaaatggccgtcgattaacctgtccgcttaatgaatcaagcaagacatatctttcagcacgcttaaatgctttagtaattgtattgtcactattttttaatttcaggctagtttgatctaaaagtttggtaactttttcttgattatactgtttttgcggtttgcctaatgcttttaattgctttattaattctaagttatcactggtctgttttaataaatcgggcaaactatacatttcagatgatatccaacgtttatttgatttctgcacaaaccctcgcaccttatgaactccttgcgctggcgttaccttcaaccgtttaagttctcgtgctggcaccattactggcagtttctccaattgcaattgatctaatgctaataagcgattaggattattcatttgcattgaagtccccgtaacactaatcaattgttctaacttctctggattatccgtccatcgctgcagagccttaaccgataaatctttaagtacatgcgcatcacttaaatcttcttttgtttctaacggctttactttttcaaattgtgacgtatcaattgctagttctggcttaatttcctttagctgtggaatttgatcaaaataattaaataatcgttctcttaaaccactatcaaaggcttgatattcgatagctcccgttttagcgttatattctttttcttgaccaattaaatttccacgtagcttagcactttcataggaccataattcaaagcctcgtgcaaatacttctgttggcgtagttaagtattcaactttactatcagacagattggaacttgctaaattttttgtatattgcgtaatcagtggtttgaaattattttctaatgataaaggccacttacttaaatgatagtcaagataatgaccatactcatgaataaatgagctaattccaaccgtatcaccgtttgagtctttacgtacttcgctttgtttcctaaattctaaaacgattgtatctaatgagggcacatacataccaagcgctcgatgatttcccagtttacgtaagcgtaaaatatttttgtcatttgctaatggcatatggctcatcaagcgctttacttcatcttcaaaataaccaaatgctttcaaatcaacatcgttatccaattcgatcttactaaaatatcgatgaagactactcctatccataatttgttgggtggctttatcaatattctttttagtttcccaagatttagcatgagtttgtttatctaaatctctttcgtagcgttgctgccgcacaatgttataagtcttttcaaggtaatttttgataaaacgattaatttgatttgcttcataagccgtttgccagctcctaaaacgaaccctacgtcctaaatactgttccgcaagctgctcgttattctgtaaagcagatgctttaaaacgtctagagattctttttaattcttcaggaccttttcctaataaatcttcctcattttcgacaatcggttctgtcatggtcataaattcttgataactcaaattgcctaaagctgtctcttgaaaccgcgtttgccaactctttttagcatatttatgagacgttaatcgataaagttgagccttaaactcatcaagcggaacctcttgcttagtgctttgccattcctgcattaaatcgttaaggagcttaccgtaccctaatgtataattttgatttccaattacccaagtaacgttggggtcatagaccttataataattatccccctgatggctccaagatttattatcttgatcaagaatgaaataaagttttttactattttcatctttataattgattgtatacgtatttcgatttgttcttagtacttgttggccaccaggatcttttactatgcttgcaatttctcttttgtcagtattacctctgtcagtattttccaagtaggatttaatggcatctgcataatcttgatcattccattctccatttttataaatatagttcgcaatttttcgaaaaacaacaaatagtgaatcatcagagtttaatctcaaactgctttgtttagtaaccccatacttttgcttcattagggttgccaaaggatgtttaatttcatcttcagacattaaaaagcccccttatatgctgtgtgtaattccatcatataagcaggcttgcttcattttatcttttgccaactatcgttcacgtgacttagttgtaggtctattcagttgtttgtcctgattatgctctttttctttaaaaaattctctttttactcttagattcaacttacgacttaatttttgtgcttcattaaagattttttgccgttcattaactgatagttgcttaaataattctttctcatcatttctaagtttaaattcttcttttaagccagcagaagaagtggttaaatacctggcaatatgaagcgacatggctgccttaggattattcaggcgttggttagtcaatatgaggactttatttgtctgtcttcgccgatctgcagctgactgatttaagaaacgactattttcccgagcgattgctaaagcatttttcatcaattcgggatgctttttaccaatttcttcgactgcataaactgtagccggatttagttcgattattccttttttgatttttggtacaaagaccttagttccatgtaactcttgaaaattaattttacttaacgaattatccttttgatactcacttgcaggtgcatagaccgtccctagctgatgattagctaacaataattgattgccattttgattgaatttattaccgtgcgctctaagcgctcccattcgatttaccgttcgttcaaaactctcaggatcatttaatgttgcgtccaacaaccggttagctttaacagtcaaagtattccgatctttaacctcttgtgttaattcaagagaagcttttaagtttgcaccactatcaattgcgcgtttagcttcctcatagctatgatactcaactggttcttttaatttaccatcgcgattatctagaccaaagtaagtaccattttctttatcaaaggcaatgtaagtacccttatagtcgccctcttgctgctccgtcctcgccaggacttcaccaagctcatacatatcaagtactgttttacgttgttttggcttgatttttggcattttaacatattcgtctacttgataatccaatcgctttatcaattctctttgggtctgtgataaagactgattaactccgattaaggcttcctgagtttccggaacgaccctaatcaaccctgtcttagcatgtaatgcaccccaaaacttttctggatcacccgtataaagctctttgccttctgaaataagtccttcaatcatacggtgatcttctgtccgtgacccgtactcgtaattacccgaaattaagctcccatcacgtaaaatatataacgcttcttgaggattcttagttaactgatactcattatcttgcaaataattttttattgcatcatcagttaccatcccgtttttactttcatattcggtcataattgccacctcagttactttttgcattcaaagtaactgagataacgaaaaatcaatcttacgccaaaagaagaagccagccgttaagctgactttattttttcattcacctcgttcaaatttggacaagttgattctgctaacttcacgtctatgtatcaactacgtatcgacattacgctgaaatggtgtataatgtagttgtagcaactaagctacgcaaagctggtatgtttaatgaagaatgttggagggatttatcatgaaaagcacgaaaggaatactcactttatcaaagtggggtaatagtttatctatacgaataccaaaaaatgtattagatattctaaagttaagtaacaatgataaagtatcgtatcaactaaaagacgataaaattatattaaaacctgagaagaacgaaagcccattaagaaaaatgttcgatggttttgataccgaagcatatttcaaaaatgagcctaaaaacaaagaaattgattggggcaagccacaaggcaaagaaatgttttaattgctggagccagcacgctttcggcgaaggcaataaaatatttcttagaagggagatttcattaaatggaatcttataaagacttaaagcaaggacaaatcatcaagattagtcttgacccaactgaaggacatgaacaaagtggatatcgtcccgctttagtagtatcaaacaacgattttaatcagctatgtggtggtatggtaaagattatgccaatcacatctaacgaaaagtatttcccgttgcatataaaactaccaaggcttgataacattcatggcgttgttgaattggagcatgagcggtcccttgatttaagttttcgatctttcaaacctgttgacgaagttccagaggactttttagcagatcttttaaagaagaattctgctacatactaaaaaatccatcagctattaagtgatggacagaatagactatgtacttgtataacaacttaagtatatagtctttttttatgctcgtaaagaaaacagatgtttacttaccattgttgaccaatgtgttactgaggccgagaaaattttagtttttctcagcctcaaacttgtgtatctatttatcataatgaatggtacttaaattgaattatttgtatttctttactcgttactccatataccattcgatgttcactattaagcttgcgagactagaagccagataaattatgttgcaatggttcaggtttaccaagaccagtaaatggatgacgaatagtatcactaataattttatctattcgttttaccattttttatcatcctttttccaatttaaatattctttccaagcatcttgtgtaaaatcaatgttaagcttggtcattagctgctgccatcctctcaaattcttccggagttaagaaatgatgtttagtagaatcatctagctgattaatagaatgtgctaaagcttcttgatttgctttgctctttaaaaggtagttagtttcttgccaagagttatattctttttcagatattacaacaacattcttttgttctggacaggcaacaatgattgcttcattataatttgctacgtcatcagcatattttttaaatgatcttctgaaatcttttgttgtaactgcttgtaccatagcgtatcacctctatttatattagatcagcccctttaatatttgtacacacatatgtacaaatatttgaattgatgtaataaaaaagccagtcaccgttgaactgactttcaattaattattaaaagcatatattgctgctccaccaattatatacacggataagagtgcccttaaaataggattttgaatcatataaataataaaaatcatatttattatcgtaagtatagcgagtataactactgtcaaaagtaagtaatctttagtagctgcctgccacaaattacgatataaaaagaaaaggtatagtagccctacacccagtaatactatacttcctaaaaggtataaaggagctgaactatttattgcaatatcaaaataggttctacctttcaatgccttatttaaattgtttaaatttatcaaataccacccagaaagcacttcatatataacaaaaagaattacttttaagctattattttcccaccaacttttcatgacttttatcttccttcatactctttatttttttattaatcaatgttaagtgattataaattatatttttttcagactggataataatttcaattattgctaacaaaattagataagcaacaagaataatcagcaaagttccaatcatacttggaagatctttagtatgctgagatgtagcaaactttctaagagaaataatgccacttgcaataattcctaccgttaatgtagttacaatccaccaatatattttttgtattaaatctatatttctttttttagactcaaactttagctttattggagttaagtcgttttctttagcgtaatagtcatccaaataactattgaagattttaacaggaacgtttcccaaaaatcttaagttatttttcaattgtttttggtattttttcatctaatatcacctttataattataatttacattcaaattatgtgaaagtcgaatcacaacattattgttgataaataaagtcagtatgatccaagttaatcgccacaaccatgtagcggcttaatgattgtttaacctcttctcgcatttttatctcaaatggttcattagtacctataataacgcccgttgcaacgttactggttaagttagtaattagcccaatatcatattcattgtccataatttatcagtctccctaaaagcttaatctattatttagtaaactgatattttttatgagaacaaatttcgccagcaatattatctatcgttcataaatttcttctcgttctaattcacggtcttctctttcaatatcatcttcatcgtttaaatgctttcttaacgcaagaactcgtttccgaccatcttgattaatttgacctaaaagccgactcaaattactgttaattatcccttgatactttgaatttttttggtatttcttttgattattattaatataagtcaattgatgttccaactcagtatcaattaattcactgttttgagcaaactcatattttttcttaaggtcagtgaaaagtggccggttgagttcattgcgtctagctaaatcattttgatatgcttgattatttttatgaatttgtaattttgcatctaaaatatcttctaagttcttgtaataggcagttgcgttcattattcgataatcgctattaggattaggaattactaaagaaattgatggatcatctgtattactttgaatcattgcaatttccgcagctagttgcttcttcctagctaaaactgattttgtagtcaccagattaattggaactttatttacatccatataacgattttttaacacattaaaccgttgcattaattttgggttttgggttaaacgataacgaggtaactttcttaattgaattagttctttttgttcatttaaagaatggaggaaaaattgatttaggttcgttgatggtgcgccttgcaattgaacaatccgcatatctaaactttctttttgtgcatctaaattaatctgccgaatgtagtacttccttaaaccaatttgcatttttaatcttttggcttcttttgacttcgggtcaagcttcttcaatctttccttttctaaatttaataatttcttattctcagtgagaccttgtgacttaatttgtgccattaagtctctttttttattgctactgttattcttctgatattgttcctcgttatcccttcctaaatttcaagaataagttagccactggactcaaataaataatactgaccaattgattattggttgatggagctgtgatatctcttggtagaaggccttacgatagatatccattgacgaatgtccattaaacatagctcgtggatagtgattcatccaatcattagtcgctatgatctgagcactactatagttatttatagcttcacctttggtaatctccttgcggagaaaccggttattgatctcattggatccacgttcccaaggggaatacggatcagcatagaaaacatgatcgtgaacttgtgttaactcactaaattctgaaccgttgtcagaggttattgtcttaaagatgcgatagtaagcatctgtgcccattttctggcgtaaatttataaagaactgatttactgcatgcgcagttttaccagcaattttactcgtgatattaactcgtgaaaggcgatcagtcattactagtacaacactgtcattaccgtttttctgtccctgaactgtatctagttcccaatggccaatttcggaccgttggtccgcagtttgaggtcgttgagcaatattaggacctaagcaccttttagcttgcggatgagttcgatgatgcttacgtttaggcttttcaaagaggtctaaattggacgtacgaagcacaccctcattaatccattgatataaagttacaaccgactttgggatcagggtgccatcattcattaaatctcgagccttataaataaccgcttgtggggagtaatggtggtcgtcaaactcaccaagcattagctgatcagctaatcgtaaaaattgctttgaagaataatataagcgacgacgaccagaatggcggtgatgttcaagatatgtggcctgaccagcttcataactatagatgtagtaagaatattcgtaaatcttaccattagatttttgacgacgaagttggcggaccgtaccacggttgagctcgttattaattgtttgatgattaactcctaattggcgaccaattgcgcgattggaaagtccttgcgactttaaagtcgcaatcatcacacgttcttctttagtaagatgagcattctttttatgagtagtcaataaactagtagacatggtatcatttaagtgcgtcatttgacggacatcctttcatataggtttggttcacttaatatgatacctgatgtcacgccgaatggcgttttttatttaccaccaactgggtggctaacttcattctataatccaccctcgttatcccttaataaatcataaattcgattagcgagatactctcttaattttttatccgctggattaaccgtatctttaattttttgaccatattttttacgattaattgcatctttggcttttaagagatttatatattctaaatactcattatttaagcttgtttgcaataaactattaactaattgatccgttagttgcttagcctccttaaaatcaacgctatgatttgaagaacgccattttcttttgtctttataatccggtaaagcattagcaatttgctgtaagtaatttttttgttgaatagttacatcgtttgttaatccgttagttaattttttcttagtagcatcaagtgctttctcaatttcaatcatccttgaacgactttttttattttctaattcatgatggatttgagatttaaataaacgaatcgatttattcttaaacattcccttaggaacgccattttttaatggacgtgtgttatggcgttgactaattgccaagtggacatgaacatgatctgtattcaaatgaatatcaccccaccagaaagtttcttgattatctaatccttcgtttgcgagaaagtttggcatcgcatcttgaattgctttcttaattaatttttgatttacttttttcgttttcggatcatatagcccagctttggttaaaaattctgggctaaaagatataacgccagcccataacatcgatttattagtttgagcctcttttaaattatttattaattgttgatgctgttcttcagataattcatagacaccttgcgaaaaagtagggtagtccccctttaattttttatccaggtcatcttccatttttgtggcagctttacgatcagtatatccaagataaccttcaaagttttctggtaaatctggatcttgttgaaaatttttattggtaatttcaacatcttctggactaggattaattgcttctttacgttcggtatattggagatacctttctccattagcaattccgaattgttgggtataaataatatctggtgcttgattattttttatcatttgttaactcctaatcaaataattacgacttaattacaatgattttttctaaataagcaacctttgccaaagaaaaaagccagctgttaggctgacttcaacaaatatattagcaaaataaatttaattagtttatacattaaatcgcaatccgcttatcctgtttcattagtccttcatatcatcaagctttgtcgacgtaatctattatttcttccgcaagttttatacttttttcacactcttttgcaattttatgactactagcatgataatccgcatccactcggaaatcttttagtgtcatggcattttgaaaatatctttcttctgactcatctctgaaggcttctctccacatatcatcatgtgaattagggccacggaattctgtcccatatattcttctatgtttcgtataattaaatgctgcataataggcacgactaatagcaattctttgactacattcatctgaatttttagcaagttctttcgcaacatttaaatattctttccaatcaaacataaatactatcccatagctaaatgacgatttttagttaagtcttttggcaaatcaaaccaaacattctcacgaaaattccaaaattcgtcaaaaagtttctcttcagatattctagagttttttaactctaaataggtaactggtttcccaaattctacattcacaattaagccagggctaaaatactcgctcatattttttgcaagcaacttaaaattacttgcatccattaacgacgaatttgcattattatatataaattttatatcatagaaagtttcagtaacaatatcttgaaaataatttttcctggtttgatttgattgtacataaaaaacagaaaccatttcgtgatcgtgatttttaatcgtgttaactgtattagcaatcataatcaacttcctcctggttaactagatttttaaacgagtttaacgcttttttataaagctcattcatgtcgttactatcttttcctttcttagtatcatgcgatatagctgaaaaaagcgaaattttatttctttctgatctaatcgatactactaattcgtccccatttaattctgacgtgaaagatatatcaaaattaccaattgacgttgtctcattatctgaaaatttatctgttattgctggaaaaacatttaatacacttccgatatttaccggattatttatttctaacgtattttctaaaacgccttggatgccaagaccatacgtaaaaaaggttgttttttcattattgtctagaatataacgaagaatttttttatattgctggagtaaaccacgcaattttatattaccagtaatcaaaatccgatgatcatcaatagataatttgatatcatcactttcttcttggaaaaactcttgcggtattgctatctgttgatcatgctttttaaacgtaattaaaagtattagcttctcagcccgttcaatataattcatattaaatctcacattctaattatttctaattcaattatgaaacattttgacaagttcttcaactaaatttcacttggacttaaatgttttccgaaacgatcacgaagttcaacttcaaacttaggatgtattttttctcctggtttcaatggctgatagtcgtgacgaattgtgctttcgggaatatttaatatttgcgaaatttctttattacttaaatcgaatcttttatagtaagttaccaataatctaattgcatcttttttagctgcacttctccatagttgcggatctgtttgcaacttatctcgaacttcttttaataaatttcgttccttaataacatcttttactgcagtatttaaatccccatcatcaatataggtatttaaacgactctcttggccaacatggataaaccaatctggatccaaatcctctagctcatgtaacttgtcgtagaaatccttattgttttttatattcaccattttagtcattctattacccccgaaataggattaacttatttacccttttgaaataattttttgttatctgtttctaccatctgtgataacttagcataaatttcattttcttttgtcccaaattcaaacattgattgcatgtttttccagtcatctttatcaactcggacgactgcttgattagttgccattaacaaatatagaatttcattaattcgattcatttgtttttgttcatgcttaattaaattatttagttttgtgtcatgcgtcgataaaaattcttgataaatagtttcgtatctttttcgaggacttttattccaagcattaattattaaagtaagataatcatttaatagcatattaatcaggccattatttgaggatggaatatttttaattaaggcaggatcattttcaagtttagcttcaaaataattaattttactttcagtggattttgtcattcttaaagtagttcttgtcatgttagttttcctcctcaccatcgtattcatcaaaaaagatccgtaaatgatcttcacaataattaactgatcgttcaatacgtttttgccgttcaccaattacgttcagaatttcaattaattgcttcaacgtatctatatattctggagttaaattcgcaacagtttcatttttgaaataatcactgaccaccatgcgataaaattctgctttggtcatgttatatttctttacctccttttgcaccttgccaacttgattattatctaatctaaaatgttgaagtgtttcgccatctattttcttcataaaatcatgtcctttcttttgagtgccaacctaattcttaaacagtaaaatttaagtgctagtctaattaatgagcataagggaaaacgatacctggcaagccaggtacccgccagtggcggggttttcttgtgttaccccaattctctcgtctgccgactatttgacactcagaaaaatgcgcttttgcatcacgtaaatctacaaaaagcatcatcatttgtagtatatttattgctgatacttttcaaagtttcgccaaaataaattaataaagagagactaagcccgtgaaaaagactaaatttaattatctaatactaattcttggaataattctatccatatatctactcaaaattttttctccactttttatgcaaatcttctctcatcctctaaagcattctgctttttcttctatagtagttggtttttcccataataaaatgacctttatatattggattgtagtaaccatcgtattacttttaggatcgagcattttttcatgtattatttatttacttctctgttcaatattttctaatgaaggacaatgctttaaagtagcaattactatcgccaaaattctttcaatcatttcaattataacttcattgcttttagttctaagtagtgactatttcaatctaatatctgctataatttctagttttgcattgtatcaatacctttttccaaacctacatcaagacaaaagatagtgtattataattattccagtctgacttaaattttatattttctaacagaactcattcgtaacggcaactgatccataccacctttcctcttaccagattcataggccaatgataaataacatattaaggactaaaactatcttcaaattagttagtttttgtatttcactccattctaaatatttatttttgcgaaaacttataaagaataattccattaggttatatataaatattaaagtgctcaaaaaaataaaaagatatattaccagtttcctattaaatccgcttatccataaaaaaattaacattctttcattccttcaaccttcttaaactaaaaatgaaatgtttattagttataactaaagccagcctttgatcgactggctttttgaatttatttaattcttttttccttattccatcttcttagttgcaacctttgctgggaacttatacttacctgattgagtatcatcaatttgtttttgataaagcttaatttgtaatttactttgtttaattaccttatttacgttcttaatattctgcttttgagtcgcaatatctgcttgagcttgctgaatattatcagaattactatctttatcgacttgatattgttgattattctttgcttgagaaattgctgcttgatctgcagctaattgtttctgataggtagtcaaagctcctttttcttttcgaatttctctgttcattaacttgattgattcttgtaatgattgaaccgcatattctttttgggtttgtctagttaaacgattatcaacaaattttttatcttcattaatgacaaatttgtaactgtttttgcctgctccagtctggccattcccactgcttgatgatgaaagttcgctatcactagaacttaaagattctggatcaatactagaagaagcatcataagtaatttgcgaactgtctccttgtttattaatagcttctagctgaattgctttgtatcctttcggtaagttatcaataactactacaaagttattattaacaagcggaataacttgataagaagcatcttgttttgttaatgtacgaaccttaaatttaatatttttaggatcgatatattgaccagattgtggtgccaccttaaagcgcgcaaccaggaattgttgcttagcattatatttacgagaagttagtgctattgtggcattactatcattaccaaaactctctgctgtatttaatggagtatcggcaaatcgcgatttgcttggtgcaactcgtgtgccaacaagcagccctatcattgttaaaaagagcgtgccactaataattaatttacgttgcatcgcgtggtcatcataccaagtcttaaatttagcaaatctttttccatacttatcaatccaaaattggatcttttttcgccattttcttttattcattggttacccccctgctgtttttctgtcggtttatttatttgtaagtaatggtagatgttagcaattacctgcttattagtacctgagtattgataaatatcaattccattcgcattagcaatcggttgtggttttccattgcgataaaccataaatgttggtactgaattaacattgttttgcttaaatagccttttatcttcattattttgccattgtaaatataaattcttatggcgatatggtgatggcatcaacttaccaatcgtggcttgagttgctgttacttcccaagcatttttatgaacatcaatcgctacttttttacaatctggacacgttttagagtagtacattactaccaccggctcattgcttttaagagctgcttgttgcgtttttgtactacttcgatgaagcactccaattccgtagagaaagcccgttataagcaatatgacggctaccgttaatacactaaaagtaatcactctacgacgatgcaataattctggatcatatctattcattaaaaatttaccccacttaatctattacttagcatcaaatcacttacagaaagctaagttgttgagcctgcatcacaggtttttgttctttcaattgcaataattcagctttaactaaattcattcccaagtcatgagtactattaaaggaaccttcaattgttaagcgtgtatctttatttttataaaggactaagtggtatcgcttttcgttatatttttgaaatgttgaaaactctaaagtgctttcttccgcattcaaaagatatttgcctaaagctaaatcatgctttaattcctcaaggctttcttctttgggtaaagtgattacagcgtagcctttataatcatcaaattgaaattttaatttgtatttcaatttttgttcaccttctttacctatggttcaccatcattttttaagctaaaaacattaccaacgattcttaattccgtcgacctgtaatcgcatactggaataaatttgccgtgattaaatctgacagttcctaaatttcaagaataagttagccactggactcaaataaataatactgaccaattgattattggttgatggagctgtgatatctcttggtagaaggccttacgatagatatccattgacgaatgtccattaaacatagctcgtggatagtgattcatccaatcattagtcgctatgatctgagcactactatagttatttatagcttcacctttggtaatctccttgcggagaaaccggttattgatctcattggatccacgttcccaaggggaatacggatcagcatagaaaacatgatcgtgaacttgtgttaactcactaaattctgaaccgttgtcagaggttattgtcttaaagatgcgatagtaagcatctgtgcccattttctggcgtaaatttataaagaactgatttactgcatgcgcagttttaccagcaattttactcgtgatattaactcgtgaaaggcgatcagtcattactagtacaacactgtcattaccgtttttctgtccctgaactgtatctagttcccaatggccaatttcggaccgttggtccgcagtttgaggtcgttgagcaatattaggccctaagcaccttttagcttgcggatgagttcgatgatgcttacgtttaggtttttcaaagagatctaaattggacgtacgaagcacaccctcattaatccattgatataaagttacaaccgactttgggatcagggtgccatcattcattaaatctcgagccttataaatgaccgcttgtggggagtaatggtggtcgtcaaactcaccaagcattagctgatcagctaatcgtaaaaattgctttgaagaataatataagcgacgacgaccagaatggcggtgatgttcaagatatgtggcctgaccagcttcataactatagatgtagtaagaatattcgtaaatcttaccattagatttttgacgacgaagttggcggaccgtaccacggttgagctcgttattaattgtttgatgattaactcctaattggcgaccaattgcgcgattggaaagtccttgcgactttaaagtcgcaatcatcacacgttcttctttagtaagatgagcattctttttatgagtagtcaataaactagtagacatggtatcatttaagtgcgtcatttgacggacatcctttcatataggtttggttcacttaatatgatacctaatgtcacgccgaatggcgttttttatttaccaccaactgggtggctaacttcattctacaatccacctaaatctgacagtttgctttataacaggtttttgatcatgaattatttgaacaatatcgccttcataaattttcttcccgttttgatcattaactcccgtgtacatcataattttggaaagtgagccatttgcaatccatgaacttccctcatcaaaaggagaaaagttaaatcgcagttcgttttctccttctaacctagttgaataaagcaattgatttaggccttgattatatttccgcaatttaatttctttcataacttcaatttcctccgttcaagtcaaaataatcttaatcattgctgcaaatagcagtaagaataccaatagaatcaagattaaaaatgccaacaacatggtatacagaatatttttaggtaatgcttttttccttaactcccgtcgatatatcgaccgttttggtggcaattttttcctaatcatgatttgatttttccttataactcataaattttgtccccttagtcactgaaaaaagtgatacaaattccaaaaaagcaaaaaaataaataaggtcaacacaaaggttcctaaaataggtgttatccatcgaccagtattttttatgttttttagttgtgtttcgggctcattttcttcctcgtcattccaagatccactaatcatcttatgattagctcgttggcgtagttctgctcgggttaatcgtctacgataaatcattgcttctagcctcatttaggaaggtggtgaacattagggtcaagtttacgatttagacttggcaaatgaagagctgcaatttcagcaaccgtaatattttttaagtcgtctggaaaactctgcactaacttaaataattcgattggtcgcccgttacttgcttttaagatagcaattaaattacctacacattttccactattaggaagtgttttgatgattttaggctccacttgagctatccttacatatttccgtcgatcactaaccattactagtactgattttttcttgtaaagttgcatggccaacttaaaatcccgtaatttattcgaggaaaccgcaaaataccagggtcttctttcaagcccatttgcgttaacaaatcttcctttcacgtacatcatttcttcattctccccctcaagcctccttaaagtccccgtcaattacttgtttactattatgagtggctaatagtttttcacgaatttctgatcccttactttcaaacatttctgctagttttactaaatcagtctgggctaaatccttctgacttaagaatttggtttcaggtaaaacttgcatcaggtcaaaatcttttactaaatttgctaacatttcagatgaaaatgatgaaacacgcttaaaagctttgtcatgtttactttctactgattcctgttgcttaatctgtgttcgcaaagcattatttttttgaattaagtcattaacttgtttagcaagatcatcaacctgttgtcctgattcttgagcagcttttaactccgctttaacttttttgagtttttcttcccgatcagcaagcaagctttcagcttcttctttatcagcctttaattcgtcataatcatcaggtgcaacctcaactaattccggctccttgtttttttgctcctccagttgcatttctaagtgtctttttccttctcgtaaatcattcagctcattcataatttcagcccgagagttttcaacgtctgctaaacgattagctaaacgctgattttcagaattaagtttttgaattttgtttgattgacttttagcgagctcatttttcttgctaatcgacttagccatttcctgccaaattcgcgaattacgagcttctacagttgcatgtaataaatatttttcctgttccggatcagcctttccggttgcgattgctaattgggccatcttaggaaggcttagataattatcaagcattagctcttcatccggatcattctgtgccttaattcgataatatgcttgcgcaatgttaatagcgttataggcattcccctttgaaacatgatgagctttaatccaccgctcaaatgtaatcttgtctttatcacggtttccttggcggctagttttgtctttaatttcctttagaattgtgccaaagcggataatatagtcacgccggttattatcaacctttcgttcaattccaagccaccattgccgttcctcaggagataaagctttatagctctctgacagttcactaggaacaaaaacagcctgactttcagtatttgttatttgggtaaaaccattattcgagttttcaatttgataccccgcttgtgaagcattactttcttgcatttgtaacaagccccctaaatattttgtggttttttctcaatagctgattttaaattagccgtcgagactcccatcgcttctgccattgtcaaaataaaatcagtcttagtaatttcactcttaaaatttaattgtgcaaaacggtttgctgaatcataaagtccattcactaacgcaccatgtgaaattcccctaccaccagaagtgattgaaatcatatcttgttcctccggagattgtgctacgattacccagccatcgaatggactatcttttaaaatttggctaactaattcaagcgagttccgttcttgttctttaaattccatatactcaccctcatttcgcaatcctaatacaataaaccttgcagctttcgtacttgcaaattttttatttttttaacacctacagcctctagaaaacttatgacagcattagcagattgaatagtcttaaatactgttgccaaaccaagagagccccgattaatttttagaacatcagcttgttttactggatcttcaaaatcaatcttcagaaaattacaatcttcatcgctaattacataagcgcttgcacttgacagctgatttctgtttttcatccagtgctttacagaactatcaagagtttctgcagtccaattactaagacataattctgagcttaatgaataatctttccccattttgttacctcctcgaccaatctttacttaaaaattgctaagacaatctaaattgcaacatataacataatcaataatggaataagacctatttttctaagatacagtctaaaaagataaagttttgattgtttgaattctttaaccgctgatggatcccagtcatcaagactccacttttgatgtagcagtctcttctcaattctcttttcactaataggcctaactggaattttagtaattgttgcattatatgaactatcttttgtgtaaagcgttgaatgagcagcgtccaaagcatcttggtaaaactcttttctaccgcaatatgatacttcataaacataattttcaactgggtacgcttcaagtaagtgatgacccactgttactttcactgcaaactcacctcctatgaagtccaaataagcacagttttcattgtattttctctattccccactttcgttttgaataatcaataacatcagggtgccacctaaaatagtgctgagcagcaatgctcccaaaaccgataaaactgtgttaacgctcagaaattcaattagccgtttaatcgccacaatcaaaaaaatctgaaagtaaaacgcccagccaatcaataaaattgcagcccaattcaaatgtttcatcgtcgcttaccttcttaaaggcgcaaagaggatgatggcaaagaatattgcatctagaatgcagcaaatccctaaaagcatgaatatcgtcaaaatattgtcaatcaatttatccccattcattttcaaaatctccctcgaattaattttcctgaaatacgcgaatcaaaaaacagtaagtcttaatttcttgtgtaagcttaatgctgacgctagctgacagactttcttgattacttagccgttcacttctttttgtgattaagtgagctagtcgagtaataatttgcgcttgtttcttcgtccccatatcgttaatcctccccaacttgcttaaccagaaacttcctttcgccgcttattgcgattagcaatccgttctttaagcttacgtattgcttccgggtctgcctttttgtaaagctcttcttgcggttttcgactccattctggcattggctctttaatcggcttatgacgcttatattgctttgaattacctttgctaggcatatttcgatcaccgctcttaacgtcttcaaccgtcttaattccctgagcctcatatcgtcttaaaatcgatctgagaaagccccacgaagggtactggtaccttgtttcttgtttagcaacctcaatcgcatttaggactagcttagggcctaaatgcctgacaaactcattaagagcctgctggtctgctccgcttaaattgatttttgctaaacatgctgctcggtaacagatagcttctggttcgctttttattaaatttttaagatcatctttgcgagatgatttgcctttgctaggcgtagtagtagaatcgctttgcttagctctttgcgagagctttgaacgatgtaaattcattgcatcagcttctgctgcttgagaagctgtttgaacgttgttttgccgataattgtcaaatacctttgctaggtaggagcctgctgctgatgcttgctccactttccatttggcatagttaaaggcatgggcgacaacgtcaattccaaattcattaacccactggctaatttgcttttcgacgaacgctgaaggtttaccccagatatcattccagagattatatgcttgtgaaataccttttggatcgtctagtgaatgttctgaacgattctttgcaagaatctgttcatcagtttgtgctgctttgctagcagcatacttactacttactgagtaattagtgctatgagtaattagtagtaggacgttatccaacattggaaaacgtgacataggttttcgataaaatacacctatgtttgaaaacgtgacataggtttttggcgagaaataagccaatgtcacaaaacagaacataggcttttgaacccatgagtaaaattttacttgatgcttccttggcttttttctttccattctcttcttttttgccaaaactgaattatcaccaagtgtccctaaatcatctaatacccaatcaccagctgttaattgccccttttcgttacgcaatcgacttcgttttaagtaaccaaatctttcaagttcgtctaacgctttccggagcttcgttctaccagaagctgaacgttgaacaatatcaatctcattaaatgaccaatcgtcaggtaagtgccatagcaattgaaaaacacccattgattcgagctgcagacggcggtcatcatatggagtattgcttacagttgaatacccttgacgtcttcgatgcttaattttcggcataaaactacacctgctttaccggaagtaatttccaaataaagttagccttgctattaagttttttagcaattaaatgatgttgttccaattcactcagtatttctaaattatgctcttgtgaatccctcgatttattattaatatcctcaaggctaacctctttttgtttgcgacttagtaaataaatatacagtccaattgcgtctagagttagtccctcatcaaatacatagtcaggaatttgaatttggctatttttaaccgctttatgtttaatctttataattttaggcatagtacctaccccactttcttttactgttatccatttccattcattgaaaactcgcttaaatactctttcaaccattgtgcaaaggttattgccttaaacattcaaggagaagtactatggggtttccaagtagttccttttacctctatccgtttaaggtcatctaggtaacgaaagttgtttagaatattcttccacacccatttatcacctttgttcaatttttgagtaccctcataaattttccaagttctgccaatttatgattaatccttatatttttaatcatacttacctctagttaaacgacccgatttttccgacttctcattacggattttttctgatcgccacataaggaacttctgataaagcggttcaataataattgcatacttagaggtgtcgctaacaacggcgctgctgtatggagattcaagacattcacgcattcgatcaccaaaagttccttcactatagccataatctttcataatttgttccctactcttccaaccgtttgccatcatcagaattacctcctctcccgaattaacaaattccttattattcttaaatatcctgtcatcttttcttgacaataagggtaaaaaaatatacacctatctcgtctgaccctatatctaatgcattcgcaattgaaagaatctcgtcttgcttaaacataatcctattattaatttttcgatttaatgttactcgctcaatgtttgtagcttttgcaagagatacctgattatatctcagttgttgcattcgatccttcagtttatcataattaaaaatcaaataaatcatcctctttttgtcatgttagctttacaaaagcaagtttaacatgacagtgttgcaattacaatcattttctgtcaatttttctttactcaatatgttatatttgtattttaatgttaaaattagctttaaggagttgaaacaattatgattaggaaagttgacagctttcagcataggttaaaaatagcattagatgatgcaaaaatttcccaatccgaacttggcagaagaactggtataaaccgtcaactaatatccgactacctcaaaggaaaatatgaagctaagcaagataaattatatgagctagctaaagtattaaatgtggatgaaggatggttaatgggggtaagtgataagaaggagcgccggcacccagaagaagtacaaaatactaataacggaaatggtgatattacttccgaagatattgatcattattttaatggattacgttcttacgaaggacttcaaattagcgatgagcaaaaagcatttatgcgcaattcaattaagtcctttttagaatcacaaaaggcaatgaataacaaacaaaataagcaaaaataataattacaatacatagactaactgaatataaataaaattgatgagaaaaaaggtgacgttgatgaacaagatggaagatcttattgagtggttaaaaggtgtagctaaggaacataacattactgtccttactgaaagccaatggccaagtgactgggtaccacaatcgcaaattgaattgcgatgcgtttggtacaatcctaactggtttccagcttgcgaacgaccactaacactagctcatgaaattggacacattttatctggtgatgaagttagtcttagttgtaattattgcagtgttaatgaaaaagccgaaggcgatggtgatctaattgcaattatgttgcttttagattattgccgtacacacgacatcacttttgagactaagcagcaattaattgaagcctttcgaattcctatttcaatgacagaaagcgttgatagagctactaattttacattatttgcgatgcgcaaaaaatatagagaattagctatttcttctactggcgtttttatttagcactctaaaagaacgtatgttttgcacaatataaactaaaggagataaaaatgtgggttgaaaaatataccgtacgtggcaaagttagatatcgttttggcgaaaactataaaagtccattaacaggaaagtataaaaaagtctctgttagttatcttaaaaataataatcaaactaaaagagcagcagccatcgagctggcaaaaaaaattgaaaaagctaagcaaaaggaatacttcacagataaagatatttcacttcgaaaccttgctgacaaatttttaactatctataaacaaagagttgcggttaacacttactataatgcctttcgagggcttaaacggatttgtaatgacttaggtaacgatacccttgctaataaaataactacagaaatacttaatcgctatttagatcaaaagctttatgatccagataagcctttaaccaatgcttcaatccaaaattacaagaaatacttatcaatgacatataaatttggcgttaaatatggatatcttaaaaagaatccggtcaaagatgttgaaataacatggcgaagcgaaattaaaagaaaacgtgatcgtattgaaaataaatatttgactgacgatgagtatcacgcaatccttcatgcttgtgagaaaaaagatcgtaatgatatcaagcttttcctagagtggctttatttgactggtatgcgttgtggagaggcggccggactttatgtaaaagacataattaaagaagaaggtaagtataaagcaattattgatggctccctttcacaccaacgagaactattagggactgtaagtaaccctacagttaaagtttcagtcaagaaaactgacggtgcaaaaacaattgctagtaatcgagaagtactattaccacaaaaggctgtcaatatttataaagaacttagcctcaataaagatccaaatgacttgatttttattaataaagattcacgaagtaatcgtccatttgatgcatcacatttagatcgttttctccatcgattagaagcaggagcaaaaattgataaaagtgttactacacatttttttcgccatactcatgtttcaaaattagcagaacttggagttcccttatacgttataaaaaatcacgtaggacatgaaaatagtaaaattacagaagaaatttatttacacgttactaaagaaatggaagagtcttggctgataagttaagtaagctttaatatacattttcttaatccattgctcagaacgtatgtttgataaaaatgactaactatgctatattaatatcgaacatacgtttaaaaggagctatttttatgactattttataccgaatgaagaaccctcatactaataaatatttctgtaaatctgcggatcttattaacgaagccccccttgaatattcgctcgtctatacagaagaaacggcccaaaagattattcacgatgcaaatgtaatgggtaaactcttgtttgatcatttaggatataaagaagatttcaaaggctatattcttgaagaagcttcattagacagtattcaaattccagaagaatggaaaccttatgtaaaacgaatctcccggattgaccatatttctatttcagaagctcagaaagtattccgccaagaattagtagattattgggataaatgggctatgtatgatccctttactggaaaagagatgccaactaaacgtgccccatttgaataaaaaataagcagcaagtttccttccgtgtagagggcttgctgcttaattcatttcttatgagttcataatactaccatttattagtaaaactgtatattatgtaatcttattttgatataaatacagtaaattttccacatgaaaaaccggctatgcattcaataattaaaattggttcattatcttaataatgttgattttcaattattgaatctgaaatatgcttaagatctggatatactgtcccttcattaattccaagactatttaatgtcctttttatttgaaatttactactcccatctattattatcgaacccagtttcaacttttttacagagtacgttatggactggcgataaccagcataattcacgtcaaacatcaactgaaaacaattatatttaaagtcttctttaagttttaaatcactaccagataatctataattatcaaatttatgcattatttgttttaactttattaatcttttctctttttgatgagaaaactcctttttagactttactaatgtgtctaatttcattcttttattttttaacactattttgggaagcttgttatgaactagtggtttgttaactagtcttttctttaactccacatattcttttattaaattgttttctgctttatagaagctcgaataaatatacttttgaagtttttttgagttatctcttttttgaccacttagtattgatggagttataaatgctccttgttgacgttttattctgtcattactaaacgtacttaaataaatctgaggtaaatgcatatcaaaaaatattgctaatggtttatttaacctttctctagtttttgcgatttgattcaatttttccataaaatcaatcaagtcaaaactcggcatttctttcatcatctcagaagttgtcatatgccttaactcagctataacatttgcactattatgaatgggataaggttctacattatttaactcatattccaaaccgttaccataggttgagcattgtataatagcttctcttacgtttttaggaaatttacgactgtttaagaaggtgtggcaatatttataaaaattatttattaaagaaatatccataaaattagctgctgttttggtagcaattgtatgtcctgaatcaaaaaaaactttgccattaaatacatgtacaatgccgtcttctttttcatcggtattttctactgcaaaaaataaagcaattaatgcattgcttgtaatatctaaaagtctactttttgcgccataatgttgaagagtcgccatttgatcaataactgagatattatctgtattttgtattccaagttcaatagataagcgcttatagtagttagttgaatcatcgataagcttatttaattcacgatataaatttggaataattgttccataatctttcgattctcctctaaagaaatattctttaccgtctgaataatgacgttctatttcagttataaactccgaaactgaggttattgctttattattactattcatcttattctcacctaataaaaatttaattccacttaaacaataaaaaagtgcgccgatcaagttttcctttctacttttagttaagtagttaattaaagtcatttattcttaggatatgttcataatccttagaacttatcaagctcactatatcacactctcgtttatcaaaacaaactttattatagctatatctctatgcaattctaaagtaaataggttatgctaactacttaattcttttgttacttcataagattttttgtcatatcatttattgctttcttgtgccctatctgaataaaaataagcaacaagtatcttccaatttaaattgaaagcttgctgcttattttcattaaattttgtattattaaatctcaacacatattaatcaactaatgacatttcaattttttcaatgtttccttcagaaagcttaattgcatatttttcacaaattttttcaaaaacttcttcatatgaatatactgcttcagttgaattatattcaataggttcacttttattactcaaaaaattttatattgataatgttttgcattaactttttcaccattttcttttaacactttacttttcatcattaattacctcacatatttttaaaattttaaatgtaaataaaaaagagcgcctattaagcgccccaaccggttcggtttaagtaatcaactgaaaccattttgcacaccggtgtactaattctcatgtatatattataacataaataaattgtgatacaatggttaagcgcaccgaagacttaatcaatctttactaagcgcaagtttggaggtgactcccttgcattggtgtgtactgattctcattgtgcctagtaagcacattaaacatctaattaaatggttactcaagtagtaatcttagcgctgacttttgttggcgctttttcttttataaattattgttattcacaagaatatctcttctttagataaataaaattttcccataagtttcccatggaattaaaataaggtgtttaacaacgtgttattactaatatagcgccattctcgatatatttattcaaccatgcaccaaaagcacccgcctgcaaatattgctgtgtctaaattcatatgtagcaactcttttctttttttaatacttgtaattaattaggatatctggattatttttattttttatttttattttatcaagaaaatcagaaaaaacaatttcagtttgccctctccatgcccccccatttatttaagcgatcatgttcataattgcattttttatagactgaactataatattagtaacagttattttacttttgttaataactgttattgttgaagcgtttcagaaaaagaggcgaagttattatggcacttagtaagcaagaacgtaaggaaatggctcgtaaagctatggaaaagcgtggcagcaagaagccagatggttctggttttgcaaagattgatgctgacgccaagaaactgagcgaataactcttttgaagcaattcacttatatattaaagagacagagatgtgttaacaccgctgtctctttcttttaagcattattttgttctttttcacaaaattccgcaagacgatccattccctttttaatctgctcaatacttgtagcataactaaagcgaagatatccttccccacctttaccaaagtttgatccagccgttacggcaactttggcctcattagcaagttgataaattagcttattgtcatcctgatcaaggaatggtggaatcttggcaaaaatataaaatgcgcccattggttgactacattcaaagcccatctctgtaagccgcttatacatatagtcacgccgtttaatatattaggcgtccatttcctttgttgcctcgtccccagccttttaaagcggcttctgcagcatcctggacaaatgttgcgatatccgtcacagcaaatgcatgaaccttgaacagcagatcggttactttagctggtgcgcaaaggtatccaatccgccacccgatcattgcataggacttcgaaaaatcattagccaaaattgtctggtctggaatgatcttagccatgcttgagtattcaccgtcatagtttaattcactataaatttcatcacagattgcaaagattggcttacccttaattaaggctgctaattcatttctgcttgagtataggcaattccagtcgggttagaagggttaacgaaaatacctccttttactcgatcatcatatttatctagatactgtttaagaagagcaggcgttgtttaaacccagtcttggatgta

SEQ ID NO: 45 - DNA, 38177 bp, synthetic construct
  misc_feature 1..38177: note = Based on Lactobacillus reuteri
  source 1..38177: mol_type = other DNA
taaaaattcaaaaactaatttcttctaaatgaaaacgaaataaattatagaaaagtaccaaaaccataaacaataagtttgctcgtaatatatcttttgaccatttatgatcaacaatataaatccagatatttttaatcacccgaaatgtcaatttaagttagaaagaaagtagttgctcatcagtgacgtaggacatgaatacctcatatggagttcgatagcctagtgatttgcggggcaggttatttcgcttactcatcagttgggtcaccaattcatcaggaagattgcggaaatctagctgttttgttaagccgtcccggcgtaaaagaccgttgttgttttcgttcagccctcgttgattgggagcaccaacctcggcaaagtaagtgtgaaggtcaaattgattggcaatctcgcgccagccggcgaattcttttccgttgtcaaaggtaatcgatttgaagaagtgctgcgggaatttccgaagccactgacctaagtgttggttaatcgcatcagccgtcttttcgtgcacattgagtacaatttcgaccttcgattggcgttcggtcagggtcattaccgccccttggtgctttttgccttggacggtatcagcttcaaggtgtccaaattcagtggcatagtgcggaaagtccttggcacgctcgtgaatacttcgccccaattggccagccttcccgcggcgctcaatatagccattcgggtgccgcttacctcgcatgggcaaagcacggacatccaaaccgaactgcccccgttcaaacatccggtaaagagttcgccggttacaactaattgggcgctcagcgcgcccaataatggtgtcaggcgtccacccctgggcaattttgtcgttgatataagtaagttcagccagtgacaactgagtacgttttcggccacaacgttgcttattgcgcatatagtgatcttgataatcagcaattgaggcaccggtttccaggtaacgataaacgcgataaacggtttcggcgctacggttgatcatttgggccactcggtacgctttaagcttttgcacgaaagaatgggcgatgattgtcagctcgtttgtggtaagatgggtgtaagtcatttgtggtttcctttcttttgtttaggggtattcaaaagtctaccacaaatggcttttctatttttctaacttaattttacaaacggcgtcattaataatacctcatgctaaatttgcacaaaaaacagctaccaggaagaaaaatagcgcagtaagatacgaaatcttcaaattatttctcattattaaacctttccattattgaattagtattagatatttttataataaaaattaaactaatatcttacaagtagttagaagagagaattcaaattgaaattagcaacaaaaaatcttatttatgtagtaacttgtttaatcgtagctactattggaataagtcccaatttgcgtaatcactataagcaaaaggaacaacaaattgttattgctacagctaacaataggtctaagactactaaaaatacatcaaatccagaagcaattagtagccatatgcgtactccaattgattggcacaaatcatctgaaactgtcccttatccagatttatcaaaagtcaaaaatttctggataaaggttagcttgaagaagaaccgaacatacctctatgatggtcaaaagttaatctatacaatgtacagttctggtggaatgtatactaagaatcctcaaacgggcaaaactgaaagtatgacacccatcggaacttactatgctcaagcagaacgtggtaacagtttctttaatcaatcattaggcgaaggagctaattattatgtttcttggctaaatcacggtacctatctctttcacagtgtccctactaagacaggcggaacatacaacgtaaaagaagccgataaattaggaaaatctaccggctctcatggttgtattcgattatctattccagatgctcaatggatgtcttctcatttacctgttgggaccaaaattaaaattgttaactaatttaattccgatcaagcaagcatctattattagcaagacaacgataatcccaccaactctaaggcggaataccggaatcacaaagctaagtaggttgtaaatgattagtcctaatacaacaaagatgtctgttactgctacatgtttaataaatcgtggtgttaattgatttttcattgttatctctctatctaactattattgcagtgcccttgggaacctgtcttagccatttggcatcaggtcttgagacttcgattgtgcatggcaaagaatatttattctttatccagttaccacgtacccggtgattattgatagaatagggtgattcaatataccccaattttctaaaattaagccaattattgcttattccctgattattaccattaacatggaaagtatattcaccacgagcagcattaatagttgtcactgttggggcaatattaaccttagcatttacaatgtaaatcaccttatgatcgctaatcacatataagcgatgggtccctttggtcgccaacaatttgattttcttttgcttttttagttgcgggtatttacctacctcagatgagcgggtaagattagggtgctttaaacgatttaaggcgactctttgactacttattgtagcttcattaatatacttacttgagtttaagttgatgatattaatggcaactagcaggattacaagaaggcttaaagcactataaatcataacctttaattctttattcatattcaaaacatattagctcctggagattgtattttgaagaaaaaattattactaattctaactatctttttactaacatttagcgcaagccttccagttcacgctgcttctaaaatagatgcaaaagcagcgattatggttgatgcttcaactggtcagattatttatgaacaaaacgctaatcagcaattaccaatagcatctattactaaacttttgaccatcgctgttgttcacgatgaactgcaacaacacgccattacagataataccaaggtaacagtaactcctgatattgcagctatttctaatgaccctaattattctagtattggtcttgttagtggtcaatcttattcagtcatcgaattagtgaacgctgcaatggtcaaatcagctgatggggctgttgttgcccttgctactgctgacggcaactctcttgatgagtttgtacttaaaatggaacaaaaggctcatgacattggtcttaaaaaagctaacatcattaatcctactggtctaactaacagtgaaatgaaaagcctaagttcaagtaatgtttcagcaaatgctgagaatgaaatgagcgctaaagatgttgcaatcttatccaggtacttgattcattcttatccagcaattctacaagtaacagcccaaaagaaggctaacttctttatcagtaagaataacgtcaagtccatcgaaaaccttaataagatgctcccaggtgaccaatatactgttcctggtgtcgaaattaacggattaaaaactggaacatcagataaggccggtgcttgctttgtcagcacgggaaactatcgaggccatcaaatcattacagtagttcttcatgctaatggcaataataaagataaccgattcatacaaactcaaaagttgtacaaaatgctgaaacaagattaccacttaaaaaaggttaacctacctgaaaggattactaatgttaaggttaaatatggaacacgacaaacaataactaccactccgaaagaacttaccatttggagcaataaacctttaaagtctttcactatttcccaaaattttaacgataaactgattagtaatacccagaccctacaagccccaataaaaaagggtcaacgtattggaagtatcaaattaaccagtccaacactaaaaacaatatccaatgaaccactcacatactcactatacagcaatgaaaccgtacaaaaaggaaatctattagaaagattattcaactaaaaaagggtacttctccttaacttccccaggaagcaagcactgcttgcgcagccttgctctctcgaaacctagcctatctgtggctaaaaagtttcaagagagttcgctctcattcaacccatcgctcatttactcaactaacaacttacgctattagctcagcaaataagcaatgcagacagtttaagcgcactccgcccttgcccttattcacctcagggttggttttaggttttctctaccttcaaagagaatcttctgcgagaacccgaataactcgcatagtaaataaggttgtccgtagcatttccgaagcttcctatgccactcttttagcattatgtgataaatgcagggattggcgttcccatggttgttaactacaattcctacacgtccaaggaatcacgggcgatttcgagatgcgactacgatgcagtgccactgctagcgagtttatcggttgcgacccaaaagaaaaagccggctagatcaactagtcggctttttatagtttttagggtttaatttcactgataattttgtgtagctatatcttgaaatattagcctatttccactacaattaattgtattgaagaaatagacaaccccgattgactaccttctctagttaatcggtagctcgttaagaaactgcaatttcttaacgggctttttctttactctgatttatttaattattaactgtgttaatgattacacatctttatatttaatacaatagttttttaaaacacatgtatatatacatatatatttatatacatatatatgcttgaagagtttatcaataaaagctatgatagtagtgcaattatcattaggaggtattaacatgaaaacttgcgtaatgtctttttgtaatcaaaaaggcggtgttggaaaaacttccacaaccgccttagttagttataatcttgctaaaatgggatataaatgtttaacaattgactttgatccccaggcaaatcttacttctctttttattaaaacaaaatctaaatatagttccagtgttactccaattaagacttcattaatgacagcaattaaaaataatattgatttctcacaaataactattccagttattgataatcttgatttaatccctaatgcttcagacttcttcctttactcacgttttcttgaaaatacctttaataatgaagcagagcgggtccaatatttagctgacaagataaataccgatttacgaaataagtatgattttatctttattgacgtcccgccaacatttggattagctaatgactcggcattttatgcctgtgaccagttagttattgttttacaaactcaagaacgagctttagacggagctaaagtattggtaaactatctacaatcaaatttaattgatgaatttcattcaaatgttgatattcttggaattttgccggtactttcaaagcgaaatgcacaagttgatactgagattttaaattctgctattcaagaatttggttcagaaaatatttttagcagtcacattatgaccatggaacgtgttaaaagaatggacattaccggaatcactgatggtaaaactgatatttgggataaacgaactcataatgcatatatagacgttgcgaaagaaattcttaaacgattgggagcagaagaataatgtcactacttcaacataatagaaaattatcggataaggtaaacgtacacgtaaagaatcaggttagtcgtgatgaaattgtacccaaaactcaatcagtaaccttcacccgtaatctacgagtcgataatcatattactaaccaagtagccgctctaattgatttaggagtagccgaaaataccaagcaattaattaacgacttagtacaatcacgaattaatcaattaagcaaagaagatcaaaacagattaaataaggtagtacagtcattggaaatgaaagatttctatactgttaaaagtaaactaaagaattaatatatgattgccatcgcataaaatctactagtttaattttcaaataatcttatcactcacctgttttacaggtgcttttttatactcactttgttctaatattcagcctagtataaagtcactattagcagctattctctataaaaataggtagtttacaatgtttttcaagcattttcctctaagtttatagaattatacatttgaccccatttttccatttcaagaataattggtattaaggtcttcccaaaactagttagtctgtattctgtcttcggtggaataacagggtatacctttttttcaataattttatctttctctaattcattaagttgcaaagataacattctacgagaacagttttgcattttcttttgtaattcaccaaacctacataccttattctttataaggtgatataaaataacactcttccatttgccagaaattatttgtaacgtactttcaacagggcatccttcaccgcaattaaaaatatatctttgcaagatataagcactcctttcatctgactaaatattattatcatacattaatttctaatttatcactattagggaaataattgttacataggaattttaaattctcttcttgtctctcttttttattaagttactatttgtaagtatagaaaagaaaagaggaattgatatgaaagcaattggatttactgagcatttaaatattaataaaccagaaagtctacttgattttgaagaaaagaaaccatcacctaaggggcatgatctcctagtaaaagtcagtgctgtatcagtcaatcccgttgatgttattgttcgacggagcggacgtagcaaattaaaaacaccaaaagtaattggctgggacgcttgtggcattgttgaagaaacaggcaagcaggtatccctttttaagcctggtgatagagtcttttacgcaggttcctttaaacgtcccggaagtaatagtgaataccaattggttgatgaacgtattgttggttgtgcaccaaaatcattaaatgatgatgaagcggctgcaatgcctcttacgtcattaacagcatacgaggctttgtttgaacaattatcattacctactaatagtcaagctaatgaaggtaaaacaattcttattatcaatggtgcaggtggtgttggttcagttgcaacacaattggcagctaatgctggactgactgttatcgcttctgcttcacgtccagaaagtatcaactgggttaatgaacatggtgctaagtatacagtaaaccacagaaataatttagttgatgaggtcagaaaccttggctacaaatatgtagattatattttagagttaaaagatcttgataaccattggaaagaaatgtgtgaattaattaagccagaaggtgctattgcttcaattactgaaaataggcgaccaattaatttgcgtcttttaactacgaagaaggctacctttgcatgggaatggatgtataccaagtcttattatcatacagatgatatgcaaactcagcatgaaattttaaacaagattgctcaacttatcgatgaaggcatattgaaatgtactttaactcaatccttgtcccctctaaatgctactaatcttcgtaaagctcatagtttaatagaaagtggacacatgattggcaaagtggttgtttctggatgggaggattaaatgtatgattgaaaacgatagatattaccgccgttacgttaaggatgttgaatcaggctatattttcttacaaactggcttagtaaaaaaaacaattcttgacagcttatttgaaattagctatagattagctatccaaattgcaaaagataagaaatttacagatcaaacattctttaaggatactccatacactcctatctttgataaaacacctttgaaatatgcatcacgcttaattaaacaattcaatcatattcaagatttatatcaggataatcacactgctaaattagtaagtgatataacacaatttttaaagaaactaaataatattcctgatgtacaagaactaacccatagctacttaagcttattaaaaaagactaactacgtaatgccattcttgtcatctaacaaaaccggttatgctaatcttattaataagtatgatcgtttattactattagttgatctaagaaacacacagcaaaataatcctactttaaactatcccgaattagataatgctaaattcattaatctagctagcttactggatatggaagttcgtcatgaaaacagaaatccaacattacaagaatacctcactcgacaaattgcttttgaattgatcaatattcgcggatataatgaagctccaattgtcccttggggaaatagtggttttagaaagattcaaacacaagcatcaattaccgatcctggattggggcacttaacaggtactattcgtaagatggactatattaatggtaccaatgtccatattgaatatcttgaacgtggagaagagaacgatcgtgaaattgtggaaccgtaccgactaccagatatggccactattggtaaagtaaaaatgagcgtcggtagagatacatccgtttcttcatatgttggaaggccgatgtttgaagatacgtttgacaattcatttatcaaatctgttcatacaacaattgcagtttgctcaggaatttttatgaatggcctctctgaatgcaaagtagctattgaaagaatgacagtttcacaagcaataaaatttatgcgtactgtatctgctaatgttgtccgtgatgaaagtctccaagtacttgctgcagccttttgtatcaattatccccttatagatgatcgtgaaacaacgcttaaaaccaataatggtaagccaaagaaaatcaccgatcgaatggagattgctaaactaggtattgagattgctaagcagggtaattttgacaaggtaacatttgatggtacagcgaactggtaccctagtgatcctataatggaacaacttggttataaaaattcattggaactcgtacacaaagcacatgaagtgggactattaacttatttctctgcagggtttagatttaagcacctaactgacattgtacaaacaggtacagatggtatcggtttaggtggagcacaaattttacgatttatggattccaagaatggattccaagacccatttaaacaggaaaatgttaaaaagattctcgatatcaacaaaactgctgcaaatagcgttatcggtcaaggggccattcttcttactagacttgatcggatgtattttgaaggttccttaccagaatgggctaatggacagcgtaatactttatacaaagcactattaaataaggacgaagaaaccactaataatattcttgatagtcttcaagaaataatgcaacttcctatcgatctcgtacatccattggtagcatgggggcaacggattatctctaaccaagatgatgcaattgcctttactaccatgaaaaaggaagaaaaagaacactatattaatctacttaaaagacatattaaacaccatgactataacgaacttaattctgtcttaaaagaaattcattctaataaataatattaagaggagaaataccaatggaaacacaatttaaccaacttagtacaaaacgtcgttcaatttataatctcgggaagaatattaatattgccgataagggtctctttagtgtaattaaacaagcagttcgaaactcaccaagtgcttttaacagtcaaagcgttcggacagtcgttcttcttggcaacaaatcagataaggtttgggatattactgaaaaggccctcgaaaaaattgcaaaagatcctcaaagtttcgatgagacaaaagaaaaaatcgccagtttccgtgcaggatatggaaccattctttttctcaccgatacaactaccgtgcataaattagaaaatgattttccaccatatgcagaaaactttgctgactgggcagaacaatccatcggtggtacacaacaagctgtctggactgctctagctgagttaaatatcggtgcaagtctacaacactataatcctttaattgatgatgaaattcataaggaattttcattacctaacagttggaaattacgagctgaaatgccttttggttcaattgaatctccagctggatcaaaggactttttgagcgaagataaagtatttaaattttttaagtaactagtactgaactagctgattacttatccgaacttacggggtaccttaaaaggtgctctttttttatatttaaattcattctccaaattagttttgatattataaagctagatattaatattggccataataaagctgctatgtaatatagagtctattaatataaataacttccagaaatcaaaaacgcctgccgcacgcgacagacgctgttttattctgctgaagtgctaaagtagacgctttaacagttcaagaatgaacttaatcagttttttcagttgcttcttacttaaaaaaggcaacaatacaaagatgaagatacaatgagtcactgggaagaacctccttcccacacacaaattgaatgcttgatgagggcactctggtgtgctttaacattgtatcatagaaaactttcggctataatgtaggtacaaagatgaagatgctggtgtgcaaattggatcagctgattacttatccgagccggcggggtacctgaaaaggtgctcttttttataccaatttttcttatctagggtctatttgtgataaatagcccctcggaaacgttgaaaaataaacccctagctagacgtaatgcctagttaggggttattattttgctatattgaattattcaccctgattttgtgggttaatggcaactgataagatgtaatgtgataactgattatcggcaacatcttggaccttaaacagtgtccaaactcgttcggctggttgcgtatcttgtaagtaacgacgaatgccggccaaataaggcttaactctttgtaaatccataaacagcataccgttttgtaataaacattgccgttctgcactactaagctgcaatccagcttgaagttgtaagtcctcatcagtttctgcaataatttcactattatttttaaccatcatgagtacctcctaggatcatttctattcacaaatcctattcggcgctcgtgagcgcccttagtaaaaattacttcctacccaaggtgcttctactgtcatgatataattgaaaggctgtcacatactcacttagaatctactttctaatgttgggaggtgagaacctatgaataatctgctaacctatcttttacactatttatcacaattatccctcgtggtaattcccgtttgcctggcgtattggttaaaccatcgcaagtgataaatagtcagtgacagcattcaacccacaattaaagccccttggtaattatggcggattaccgaggggcttttgtgttggtgagaacttaatacataatcctcaactatcttttacacttatattataacatgaatcaaacaaaggacaattaacatgaaacaactagtactaccaatcaaagacagtaatgttctacatgaagttgaggatactttactccataatttcaaagctggccgccgtaattacaccatcttccaagttggcaaggctactctgctccgagtgtctgatttattagctctgagacgcaatgaaatcttcaataatgatggaactatcgctaaaaatgcttatattcgtgataaaaagaccggaaagcccaatattttgtacttaaaaccagtaaaacaggatctaatatactactttcaatggctaaaccaaaaaaatatctactccgaatggcttttcccttcaactaaacacccagatcgtcatattacggagaagcaattctacaaaattatggccaaaactggtgatctgctcggtattgattacctcggtactcatacaatgagaaaaactggagcttatcgggtctacacgcaaactcattataatatcggtctagtaatgtcactcctcaaccactcatcagaagcaatgaccctcaagtatttaggactggatcaagtcagccgtgaacaaatgctcgatgaagtgaggttcgattaagatttttcacctattgttatactcaaatattgtcgatttatctggttgatatttatcaagcattttagataatattttttctaatggtatcaaattttcctctaaccataaggcatctggaggcaatacatacacctgttctctttcgggtattttactatttctcttattacgacgctcttctatagcatctaacacataattatgagcactaataagatttccatgaatatcaccattacctttaatagtaattgaattgcctggaataaagtcttctggtttataaccagctaattccaaaaaataaattgcttttaatatccataaccgatattggtgcttaactgctaaattacttggtaatttctccatattattcaaaacttctttcttattttattctactacgtaatgagtaaagtttactaagtgtataaaaagtattgcttaatcagcatacgtctttacatatacgattaaatcgtatatactgattgtggaggatatatatgtgtaataaagtaaaatttatctttggtcagtcttttatggaacaatggtatgcttgtggcttaaccaaagaaaaccgacaagaattaattgatgatatttcttattatctacgtaatgctccagataataaccacggtaagaagtttcctggtgctattattgaaggaactgggggagctattaaatatcgcttcactccagataattatcaaaagggcaaaagtggtagttttcgaacaatctactttgtttatgatgcttcaatcaatcacttattcttcttgacagtttatcctaagaataagaaggccactttatctaaacgagaaaagcatttaattaagaaattcattgaagctaaaaaacgtgataggaaggagaaataattatggcatcaattattgaaaattcattgaaagaataccaagactttttagatggaaaagatactaacgtagaagttattgaaacatctattcctataaggccagaatttgacggtaacgttatcaaaaatttgcgaaagcaaataaacgtcactcaaaaaggtttagctggccttattggtgtttctccccggactgtagaatcatgggaaatggatcgaactgaaccaaaccgttcatcacaaaaacttctaacccttttaattagaaataattccttagtaaacgaactacgtttaatctaaaataacttaaaggagaaatttaaatggataacgattttttagaagaaatgcttgaaattttaaatccctacgttggtacagaagaaggtagtggaagtaatgaaggggccgtatatggaaactacatcgaatggcccgacttagaaactcttgaagacgatcaactaaatcaactagcagcttattttgatattgatagtgataaatatagtgaagatgaattagtagaccttttacgagaaaaaggagttcctgagggcacaagttatgaatatgatgctgattttcctgatagtgcaaagtactataattgttaaactaaaggaaacctttttcactaaaaataaattgattaatatttcaataattcaaggaggtaattataatgagcgaaacagaagaactaaaagcatttaagcaaaagctcgaattaaaatatggtcgtttagcaaaaaaacgtttagcaaagttatccaaagttgctaagctagataaacaattaattgatatgactgataaagaatttgatcaacaattaaacaattggtttaatcaagataattccaaaaatattcatggtgaacaacaattacaagaacataataatcaacaaccattttaaaattagagttcattacgtaagttttgaactcttttttaatcttaacttttttgaaaagttaagcaactgtttgagcccttttcgttgatgaaaaagtactttatttatccaaacttgtaaccaaatttggtcggtgttcggttacctttgacgaattcaaaaggtaacttgctgatgaaacttgcaagtaagtttctgtttgttttgtttactttttcgacaaggaaaaaagtaaattgtcttggctacttcacaacaagaagtagcactaaaagggtcaagggaaagatgtaatctgttcctgcaagcaatacaagtgtcactaattaacgtagttaatgtgtacacgaagtaaactgcttgctcacgctgataagtgttataatttgaagtgagattgggacgcttgactgtaggtcaaaggacttttcgaactctcaaattattcttgatgtggaggaattataatggcgaagttggtaaacaaacacattagaattacggaacagcaagaccaacacttatcagcgttgagcgccaagacagggtataacgtcaacgaactaattcgtaaaatcttagataacgttgatgacgttaccctgacgacagcgctcagtcgacagcaagcaactgctaaccgtgaaatacagttacttgctagtcgaaaatacattatggatacattatcacggacacaagtatttaataatattaatcagattgcccactatattaataagtatcctaataatgatttaggaaaggaattggttaatacatttaatactgtaattaaagagatcaatgaattacggagtgatattaatgagcattgttaaagttattagttctactaacgctggtgcaaatcttaattatttaattaacgaaaaggcacataatactgaacttactagtcatcgttcactaaaacttaacggacaaaatgtatatagggactatgccaataaatttaattcccggtatcttgctgatcaatactgggcagtcaggcaacgagctaaaagtccaaataaaaaggttcaagttcaccacttgattttcagttttagtcagcaagaatttaatccaactaaacaaactctactcaaacaagcccagcaagcattaaagttagttaatgattttttacatcaattattaccatcaactgctcaatatttagaagcagttcagtgtgactccaaaggtaaaaatctacatgtccacgtttcctgcaattcgattcttaccaatggaaaagtacttgatactaatttgattagcgttaactcccgaactgtaattaaaaataaaaaacaagttcattatctcggtattcgtgatcaatttgataattacatgaccaaacatttcgaaaaattaactggtcgtgaattccatcctgttacaaaagataacaccaatctcgttaactccaaagccgttaaaattgatgaacgtggtggttacatctggaaagaagatctaaaagaacgtattcttgatgccttcaataatactgataattttgaagactttgaggcggtcttagaagctgataatggggttaaagttaaacatcgtcgagcttcaattggtaaagatgaacacggcaaaaagatctatcgtgatgccgttacgtacacttttaccgatataaattctactccccactcagcccgtgattttgcctatactaaaaatggaggtaaacgaggtcttggtctctcatttacgccacaagctattcagcatgagttcgagcagcgtcaggagaaggatcagcagattgataaagaacaagctgaggctaatcctgacacttcacagcaaataaatgctgaaatgcaacaacaactgctattgcagcaacagattaaccaaagattgctaaacgaagaaagtgaggatgataattatggcaatcaaacgcggaaatcagtttcagtccaaaaatacgaatcaggaggcaccagcacaccagctgaattcgacacaagggcatatgacgccgaaacccaacggcaagaatctgacaacaaacgtaaacgagatcaaatcagacgtcaaggctctaaggaagcaaacaaacacgctgaacggccaagccagcaacaacagcaagagcctaacaagcgtccttcaaaaccaaagcacgatcatcagccaacaaacaacaatcaggaaccaaacagagttcaccgctcagaaccaggacaatctgaaccaatcactgagcaacaccaacacgacactgaagggcctaggttataaagttgataacgtccgtggtgatcaatcactgttacaatcactaattaaccgtgttaatgcgttagagaaaaagccagatgagcaaaaacggttgcttgatgaatacgtccgtaactgggattctctaacacaacaagtaggtaagatccaggatggtcaagtgcaattcagccaatcggttcaaaggttactaagtagtatggcttattatgtaaagaataagcaaattaccgttgatgcttcaacaatggaagcattacgtgaagtcgtagaagctaggactaataattcccttgataaatatgttggaaaagttcaagctcaagcaattgatgctaacttccaaaagttagttaatgctatcaatgctcaagaagaaccaattcaacaaaaactagatttaattgatcaacgattagacggtatagatgatcgagtggagcaacttgatcgtgtatttacaatactaatgtacgtaacctttgcaatgcttcttgcaggagccttcgcaggtatgacactttggatcaacgcactcaaccatcaccccgtattagcttggatcgtacttttagtaatagttgttctaggtatttggtcatataagcgagccaaaaaagaaagtgaagatgaatagtatgacaaacaaccaaaaagaaagttggaacgttggcaactataaaatcaatgtattaccagatgatgagttccagcaattgttaaagaaccaacgccaacttcaacagatcattgaaagtatgccactaccaaccgaccccaatgttgatctagttaaaaagattcattcccaactccctattacaaactgggcttgggaattaactaaacaacgagaacatgaggaaaagttaaagaaacaaaagcagcgaattgcacagcaatcgcttaactatccaacaaacctcaagaaaccggataatggcctttccctataagccgatatcgacttacctttcagataaactaaatagtaaaggagctaacgtaatttgctagctcctttattacttactttatttaaatattactgtcagattcattaataccaatcctactaataagactttcatatttaatggacccatatgtaataaaacataaaatattattattagtagtagaaatccatttgcgataatcaaattctttttcaaattagaattcattaatggcctccttgtagtaaaaatgatactgatattatcaatatgaaataaaacaatgcacaatacattgagtttaaggcatcttttctcacaacttattctcctaataaattattaccggttctcctttagtaagggcatggaaaccgtctcctgcattttccggatgcatgttaatacagccatgtgagccaccatgagtctgtttataagctgttttagaccaattatgcctccaactagcatcatgaaagccacaccctgataaagtaaacggagaccaatactgaacaggactactatacttggaaccatcatcattagtcccacgtaaaactgatggcgtttgttgatacatgatataccaaacacctttaggagtcctattattagcgtcatctgatccactaacaatatctgtactcagtacacattttccatttttataaaaccaagcatgctgtttagctaatgatacagccacataagtattaccaagcccatgattattcacagccgaatatccagtaccaagatgactatagcctttaccgtaaatatcattttcggcattaacgctcttaacattattagctaacgctttagagagtgtttgtcctgcctgcttgctacttattttccaaccatatgttccctgattagatgtagaaataacttttccagaatcagttctaaatttaaagctctttcctaatgttgcttgcttattatttatattggcaatcttggatttaacgttgtcagtttcaaaatggtatttcccatgctgataagttgctttagaaatgacattagacgctttaaaattatattttgttttctgaacctgataaacaaccgatcgattttgtagtttactcaggtgtttcttttcatcttgaactactttactgtttgccgataaaggagtaataaccttaggagttaaatgaattgtcccattaacaaattccttattagcaatattacaaagtccttgttcactatatcgtgtcccatcaattgctggaataactgaaactttattattctggtaaacggcgtatgcatcacgtggggcctttctgcctatattgagctgatgaatcctagctactattgccgaatcaatattatttaacgctgacttatctaaatcagctggctcaactagcaaattttcatgttttcgtgagggaaaaaaagtgtattggtaatgtaacgccttactaaatctttctttatcagataacttaaaacctgagtcagtacttttacctgaataaactaactttttgttaatgtagatttttgattttcttttagtattacttactttattatatgcctgttgaacagtaagacctccgactggaatattattaatcttcacgtttttgttaaagtgtgtcttttgatgaaggtgcatacctaaaagaaataccattagcatgcctaatgtaataataattagttttttcaatgttaatttatccataaatagaactccattttagtatagaaaagctctaccttactacatacataaggtggagttctttttatattaagctatatatattacaatactcttcttgcaaaggcaggcatgtaatagcgcattggttgttccttaactgtttgaccaggttgcggtgcaaataaaacattaccgtttccggtatagattccaacgtgatatgcactaccatactttccccagaacattagatctccaggttgaagattattaaagcttacagcatgtccacaatattcttgttgagttgtagtccgtggtaagttaacaccaacttgacgataaacatactgcacgagtcctgaacaatcaaacgaattaggaccggttgctccccaaacataaggtttacctatttgttgacgtgcaagagcaacaacttgttggcccttattaccttgcggaactgccggagtactagaaggattattatttgatgttactggagtcccattaaatgaaaagttatttgaatcgtaaccgtaagttgttccattactcaaattcttaatcgcaacataacgacgtacgccactataactcatgtatgatacccaaagatacccattagcttcaatctttgaatcatatgtaaagctttgaccaccattgtaatacgttacaatagctgccgatgtacttggtgcttggcgtacatttaatccataagcaactttgaatgttccatattgcttctcagttgatgaagtagatgtacttggtgctggcgtacttggcacattagtagatggtgttgaagatgcaggagcactgtatgagaagttattcgaatcataaccgtaagtcgttccattattcaaattcttaattgcaacataacgacgtacgccactataactcatgtatgatacccaaagatacccgttagcttcaatctttgaatcatatgtaaagctttgaccaccattgtaatacgttacaatagctgccgatgtacttggtgcttggcgtacatttaatccataagcaactttgaatgtcccgtgttgactcattcgacttgagctaggagttgttgctggtgtactaggattttgttgtaccggtgctgatgtagaaccatgactttggaaatactgataccagtattgagcctgttgaccacgagctggctgattcctatttgcaggtcgctcaaagttattaagccaaatcatacctaaagtatatgctgaagcataactatgcatatattcattagcggtcattctagagtaagctgatggataatactgctgtccatgagtcatttgatattcaatatatgcacattgtccttgcaaagtacgataatcatatccattattacgacaccaatttactacactattaaatggccattgagctaacccataaccaggcccaccaccatattgatgtaagtctgggattaaacctgactctgaaacaaagttaccaagcattccagcaatagcatttggtgtccatccttgatttataaagtaatcatgaatagtcgtcgcattattgatctgttgttgagtgtaattcgtaacatactcttcggttgttagttcagatacatttattgcaggctgttcctgcgtatttacgttaaatgactgaatattatcggaactagcagaattagccactgccgtggaatcgctagaagcaatgttcccaatattatcagcatttgattcgacattagtattgtcagtatccgattttacattattcttttcatttatctttgctacagaactagaattagcattagaactaggatttacagtaatttgagcttttgcatcgtttgacattacaacattttgttgagtctttgtgtcattagtttgcaaactcatattactgattgtctggttactattactttgaatgttatcggcatgcacgtttgtagctgataaaaccagtagagcaaatggcgctgccaagaaaactcctaatttatggtttaattgcatgaaccgaaaacttccttcaataatttttcggtgattataatagcatcattttctaatttgttaatctttaaacaaattgttttggagataaatcattaatatcatctaacaaatttgttaagtactgtattaaaaagcaaacacgcattcattaaaataaatagttttataaaaattcaaaaactaatttcttctaaatgaaaacgaaataaattatagaaaagtaccaaaaccataaacaataagtttgctcgtaatatatcttttgaccatttatgatcaacaatataaatccagatatttttaatcacccgaaatgtcaatttaagttagaaagaaagtagttgctcatcagtgacgtaggacatgaatacctcatatggagttcgatagcctagtgatttgcggggcaggttatttcgcttactcatcagttgggtcaccaattcatcaggaagattgcggaaatctagctgttttgttaagccgtcccggcgtaaaagaccgttgttgttttcgttcagccctcgttgattgggagcaccaacctcggcaaagtaagtgtgaaggtcaaattgattggcaatctcgcgccagccggcgaattcttttccgttgtcaaaggtaatcgatttgaagaagtgctgcgggaatttccgaagccactgacctaagtgttggttaatcgcatcagccgtcttttcgtgcacattgagtacaatttcgaccttcgattggcgttcggtcagggtcattaccgccccttggtgctttttgccttggacggtatcagcttcaaggtgtccaaattcagtggcatagtgcggaaagtccttggcacgctcgtgaatacttcgccccaattggccagccttcccgcggcgctcaatatagccattcgggtgccgcttacctcgcatgggcaaagcacggacatccaaaccgaactgcccccgttcaaacatccggtaaagagttcgccggttacaactaattgggcgctcagcgcgcccaataatggtgtcaggcgtccacccctgggcaattttgtcgttgatataagtaagttcagccagtgacaactgagtacgttttcggccacaacgttgcttattgcgcatatagtgatcttgataatcagcaattgaggcaccggtttccaggtaacgataaacgcgataaacggtttcggcgctacggttgatcatttgggccactcggtacgctttaagcttttgcacgaaagaatgggcgatgattgtcagctcgtttgtggtaagatgggtgtaagtcatttgtggtttcctttcttttgtttaggggtattcaaaagtctaccacaaatggcttttctatttttctaacttaattttacaaacggcgtcattaataatacctcatgctaaatttgcacaaaaaacagctaccaggaagaaaaatagcgcagtaagatacgaaatcttcaaattatttctcattattaaacctttccattattgaattagtattagatatttttataataaaaattaaactaatatcttacaagtagttagaagagagaattcaaattgaaattagcaacaaaaaatcttatttatgtagtaacttgtttaatcgtagctactattggaataagtcccaatttgcgtaatcactataagcaaaaggaacaacaaattgttattgctacagctaacaataggtctaagactactaaaaatacatcaaatccagaagcaattagtagccatatgcgtactccaattgattggcacaaatcatctgaaactgtcccttatccagatttatcaaaagtcaaaaatttctggataaaggttagcttgaagaagaaccgaacatacctctatgatggtcaaaagttaatctatacaatgtacagttctggtggaatgtatactaagaatcctcaaacgggcaaaactgaaagtatgacacccatcggaacttactatgctcaagcagaacgtggtaacagtttctttaatcaatcattaggcgaaggagctaattattatgtttcttggctaaatcacggtacctatctctttcacagtgtccctactaagacaggcggaacatacaacgtaaaagaagccgataaattaggaaaatctaccggctctcatggttgtattcgattatctattccagatgctcaatggatgtcttctcatttacctgttgggaccaaaattaaaattgttaactaatttaattccgatcaagcaagcatctattattagcaagacaacgataatcccaccaactctaaggcggaataccggaatcacaaagctaagtaggttgtaaatgattagtcctaatacaacaaagatgtctgttactgctacatgtttaataaatcgtggtgttaattgatttttcattgttatctctctatctaactattattgcagtgcccttgggaacctgtcttagccatttggcatcaggtcttgagacttcgattgtgcatggcaaagaatatttattctttatccagttaccacgtacccggtgattattgatagaatagggtgattcaatataccccaattttctaaaattaagccaattattgcttattccctgattattaccattaacatggaaagtatattcaccacgagcagcattaatagttgtcactgttggggcaatattaaccttagcatttacaatgtaaatcaccttatgatcgctaatcacatataagcgatgggtccctttggtcgccaacaatttgattttcttttgcttttttagttgcgggtatttacctacctcagatgagcgggtaagattagggtgctttaaacgatttaaggcgactctttgactacttattgtagcttcattaatatacttacttgagtttaagttgatgatattaatggcaactagcaggattacaagaaggcttaaagcactataaatcataacctttaattctttattcatattcaaaacatattagctcctggagattgtattttgaagaaaaaattattactaattctaactatctttttactaacatttagcgcaagccttccagttcacgctgcttctaaaatagatgcaaaagcagcgattatggttgatgcttcaactggtcagattatttatgaacaaaacgctaatcagcaattaccaatagcatctattactaaacttttgaccatcgctgttgttcacgatgaactgcaacaacacgccattacagataataccaaggtaacagtaactcctgatattgcagctatttctaatgaccctaattattctagtattggtcttgttagtggtcaatcttattcagtcatcgaattagtgaacgctgcaatggtcaaatcagctgatggggctgttgttgcccttgctactgctgacggcaactctcttgatgagtttgtacttaaaatggaacaaaaggctcatgacattggtcttaaaaaagctaacatcattaatcctactggtctaactaacagtgaaatgaaaagcctaagttcaagtaatgtttcagcaaatgctgagaatgaaatgagcgctaaagatgttgcaatcttatccaggtacttgattcattcttatccagcaattctacaagtaacagcccaaaagaaggctaacttctttatcagtaagaataacgtcaagtccatcgaaaaccttaataagatgctcccaggtgaccaatatactgttcctggtgtcgaaattaacggattaaaaactggaacatcagataaggccggtgcttgctttgtcagcacgggaaactatcgaggccatcaaatcattacagtagttcttcatgctaatggcaataataaagataaccgattcatacaaactcaaaagttgtacaaaatgctgaaacaagattaccacttaaaaaaggttaacctacctgaaaggattactaatgttaaggttaaatatggaacacgacaaacaataactaccactccgaaagaacttaccatttggagcaataaacctttaaagtctttcactatttcccaaaattttaacgataaactgattagtaatacccagaccctacaagccccaataaaaaagggtcaacgtattggaagtatcaaattaaccagtccaacactaaaaacaatatccaatgaaccactcacatactcactatacagcaatgaaaccgtacaaaaaggaaatctattagaaagattattcaactaaaaaagggtacttctccttaacttccccaggaagcaagcactgcttgcgcagccttgctctctcgaaacctagcctatctgtggctaaaaagtttcaagagagttcgctctcattcaacccatcgctcatttactcaactaacaacttacgctattagctcagcaaataagcaatgcagacagtttaagcgcactccgcccttgcccttattcacctcagggttggttttaggttttctctaccttcaaagagaatcttctgcgagaacccgaataactcgcatagtaaataaggttgtccgtagcatttccgaagcttcctatgccactcttttagcattatgtgataaatgcagggattggcgttcccatggttgttaactacaattcctacacgtccaaggaatcacgggcgatttcgagatgcgactacgatgcagtgccactgctagcgagtttatcggttgcgacccaaaagaaaaagccggctagatcaactagtcggctttttatagtttttagggtttaatttcactgataattttgtgtagctatatcttgaaatattagcctatttccactacaattaattgtattgaagaaatagacaaccccgattgactaccttctctagttaatcggtagctcgttaagaaactgcaatttcttaacgggctttttctttactctgatttatttaattattaactgtgttaatgattacacatctttatatttaatacaatagttttttaaaacacatgtatatatacatatatatttatatacatatatatgcttgaagagtttatcaataaaagctatgatagtagtgcaattatcattaggaggtattaacatgaaaacttgcgtaatgtctttttgtaatcaaaaaggcggtgttggaaaaacttccacaaccgccttagttagttataatcttgctaaaatgggatataaatgtttaacaattgactttgatccccaggcaaatcttacttctctttttattaaaacaaaatctaaatatagttccagtgttactccaattaagacttcattaatgacagcaattaaaaataatattgatttctcacaaataactattccagttattgataatcttgatttaatccctaatgcttcagacttcttcctttactcacgttttcttgaaaatacctttaataatgaagcagagcgggtccaatatttagctgacaagataaataccgatttacgaaataagtatgattttatctttattgacgtcccgccaacatttggattagctaatgactcggcattttatgcctgtgaccagttagttattgttttacaaactcaagaacgagctttagacggagctaaagtattggtaaactatctacaatcaaatttaattgatgaatttcattcaaatgttgatattcttggaattttgccggtactttcaaagcgaaatgcacaagttgatactgagattttaaattctgctattcaagaatttggttcagaaaatatttttagcagtcacattatgaccatggaacgtgttaaaagaatggacattaccggaatcactgatggtaaaactgatatttgggataaacgaactcataatgcatatatagacgttgcgaaagaaattcttaaacgattgggagcagaagaataatgtcactacttcaacataatagaaaattatcggataaggtaaacgtacacgtaaagaatcaggttagtcgtgatgaaattgtacccaaaactcaatcagtaaccttcacccgtaatctacgagtcgataatcatattactaaccaagtagccgctctaattgatttaggagtagccgaaaataccaagcaattaattaacgacttagtacaatcacgaattaatcaattaagcaaagaagatcaaaacagattaaataaggtagtacagtcattggaaatgaaagatttctatactgttaaaagtaaactaaagaattaatatatgattgccatcgcataaaatctactagtttaattttcaaataatcttatcactcacctgttttacaggtgcttttttatactcactttgttctaatattcagcctagtataaagtcactattagcagctattctctataaaaataggtagtttacaatgtttttcaagcattttcctctaagtttatagaattatacatttgaccccatttttccatttcaagaataattggtattaaggtcttcccaaaactagttagtctgtattctgtcttcggtggaataacagggtatacctttttttcaataattttatctttctctaattcattaagttgcaaagataacattctacgagaacagttttgcattttcttttgtaattcaccaaacctacataccttattctttataaggtgatataaaataacactcttccatttgccagaaattatttgtaacgtactttcaacagggcatccttcaccgcaattaaaaatatatctttgcaagatataagcactcctttcatctgactaaatattattatcatacattaatttctaatttatcactattagggaaataattgttacataggaattttaaattctcttcttgtctctcttttttattaagttactatttgtaagtatagaaaagaaaagaggaattgatatgaaagcaattggatttactgagcatttaaatattaataaaccagaaagtctacttgattttgaagaaaagaaaccatcacctaaggggcatgatctcctagtaaaagtcagtgctgtatcagtcaatcccgttgatgttattgttcgacggagcggacgtagcaaattaaaaacaccaaaagtaattggctgggacgcttgtggcattgttgaagaaacaggcaagcaggtatccctttttaagcctggtgatagagtcttttacgcaggttcctttaaacgtcccggaagtaatagtgaataccaattggttgatgaacgtattgttggttgtgcaccaaaatcattaaatgatgatgaagcggctgcaatgcctcttacgtcattaacagcatacgaggctttgtttgaacaattatcattacctactaatagtcaagctaatgaaggtaaaacaattcttattatcaatggtgcaggtggtgttggttcagttgcaacacaattggcagctaatgctggactgactgttatcgcttctgcttcacgtccagaaagtatcaactgggttaatgaacatggtgctaagtatacagtaaaccacagaaataatttagttgatgaggtcagaaaccttggctacaaatatgtagattatattttagagttaaaagatcttgataaccattggaaagaaatgtgtgaattaattaagccagaaggtgctattgcttcaattactgaaaataggcgaccaattaatttgcgtcttttaactacgaagaaggctacctttgcatgggaatggatgtataccaagtcttattatcatacagatgatatgcaaactcagcatgaaattttaaacaagattgctcaacttatcgatgaaggcatattgaaatgtactttaactcaatccttgtcccctctaaatgctactaatcttcgtaaagctcatagtttaatagaaagtggacacatgattggcaaagtggttgtttctggatgggaggattaaatgtatgattgaaaacgatagatattaccgccgttacgttaaggatgttgaatcaggctatattttcttacaaactggcttagtaaaaaaaacaattcttgacagcttatttgaaattagctatagattagctatccaaattgcaaaagataagaaatttacagatcaaacattctttaaggatactccatacactcctatctttgataaaacacctttgaaatatgcatcacgcttaattaaacaattcaatcatattcaagatttatatcaggataatcacactgctaaattagtaagtgatataacacaatttttaaagaaactaaataatattcctgatgtacaagaactaacccatagctacttaagcttattaaaaaagactaactacgtaatgccattcttgtcatctaacaaaaccggttatgctaatcttattaataagtatgatcgtttattactattagttgatctaagaaacacacagcaaaataatcctactttaaactatcccgaattagataatgctaaattcattaatctagctagcttactggatatggaagttcgtcatgaaaacagaaatccaacattacaagaatacctcactcgacaaattgcttttgaattgatcaatattcgcggatataatgaagctccaattgtcccttggggaaatagtggttttagaaagattcaaacacaagcatcaattaccgatcctggattggggcacttaacaggtactattcgtaagatggactatattaatggtaccaatgtccatattgaatatcttgaacgtggagaagagaacgatcgtgaaattgtggaaccgtaccgactaccagatatggccactattggtaaagtaaaaatgagcgtcggtagagatacatccgtttcttcatatgttggaaggccgatgtttgaagatacgtttgacaattcatttatcaaatctgttcatacaacaattgcagtttgctcaggaatttttatgaatggcctctctgaatgcaaagtagctattgaaagaatgacagtttcacaagcaataaaatttatgcgtactgtatctgctaatgttgtccgtgatgaaagtctccaagtacttgctgcagccttttgtatcaattatccccttatagatgatcgtgaaacaacgcttaaaaccaataatggtaagccaaagaaaatcaccgatcgaatggagattgctaaactaggtattgagattgctaagcagggtaattttgacaaggtaacatttgatggtacagcgaactggtaccctagtgatcctataatggaacaacttggttataaaaattcattggaactcgtacacaaagcacatgaagtgggactattaacttatttctctgcagggtttagatttaagcacctaactgacattgtacaaacaggtacagatggtatcggtttaggtggagcacaaattttacgatttatggattccaagaatggattccaagacccatttaaacaggaaaatgttaaaaagattctcgatatcaacaaaactgctgcaaatagcgttatcggtcaaggggccattcttcttactagacttgatcggatgtattttgaaggttccttaccagaatgggctaatggacagcgtaatactttatacaaagcactattaaataaggacgaagaaaccactaataatattcttgatagtcttcaagaaataatgcaacttcctatcgatctcgtacatccattggtagcatgggggcaacggattatctctaaccaagatgatgcaattgcctttactaccatgaaaaaggaagaaaaagaacactatattaatctacttaaaagacatattaaacaccatgactataacgaacttaattctgtcttaaaagaaattcattctaataaataatattaagaggagaaataccaatggaaacacaatttaaccaacttagtacaaaacgtcgttcaatttataatctcgggaagaatattaatattgccgataagggtctctttagtgtaattaaacaagcagttcgaaactcaccaagtgcttttaacagtcaaagcgttcggacagtcgttcttcttggcaacaaatcagataaggtttgggatattactgaaaaggccctcgaaaaaattgcaaaagatcctcaaagtttcgatgagacaaaagaaaaaatcgccagtttccgtgcaggatatggaaccattctttttctcaccgatacaactaccgtgcataaattagaaaatgattttccaccatatgcagaaaactttgctgactgggcagaacaatccatcggtggtacacaacaagctgtctggactgctctagctgagttaaatatcggtgcaagtctacaacactataatcctttaattgatgatgaaattcataaggaattttcattacctaacagttggaaattacgagctgaaatgccttttggttcaattgaatctccagctggatcaaaggactttttgagcgaagataaagtatttaaattttttaagtaactagtactgaactagctgattacttatccgaacttacggggtaccttaaaaggtgctctttttttatatttaaattcattctccaaattagttttgatattataaagctagatattaatattggccataataaagctgctatgtaatatagagtctattaatataaataacttccagaaatcaaaaacgcctgccgcacgcgacagacgctgttttattctgctgaagtgctaaagtagacgctttaacagttcaagaatgaacttaatcagttttttcagttgcttcttacttaaaaaaggcaacaatacaaagatgaagatacaatgagtcactgggaagaacctccttcccacacacaaattgaatgcttgatgagggcactctggtgtgctttaacattgtatcatagaaaactttcggctataatgtaggtacaaagatgaagatgctggtgtgcaaattggatcagctgattacttatccgagccggcggggtacctgaaaaggtgctcttttttataccaatttttcttatctagggtctatttgtgataaatagcccctcggaaacgttgaaaaataaacccctagctagacgtaatgcctagttaggggttattattttgctatattgaattattcaccctgattttgtgggttaatggcaactgataagatgtaatgtgataactgattatcggcaacatcttggaccttaaacagtgtccaaactcgttcggctggttgcgtatcttgtaagtaacgacgaatgccggccaaataaggcttaactctttgtaaatccataaacagcataccgttttgtaataaacattgccgttctgcactactaagctgcaatccagcttgaagttgtaagtcctcatcagtttctgcaataatttcactattatttttaaccatcatgagtacctcctaggatcatttctattcacaaatcctattcggcgctcgtgagcgcccttagtaaaaattacttcctacccaaggtgcttctactgtcatgatataattgaaaggctgtcacatactcacttagaatctactttctaatgttgggaggtgagaacctatgaataatctgctaacctatcttttacactatttatcacaattatccctcgtggtaattcccgtttgcctggcgtattggttaaaccatcgcaagtgataaatagtcagtgacagcattcaacccacaattaaagccccttggtaattatggcggattaccgaggggcttttgtgttggtgagaacttaatacataatcctcaactatcttttacacttatattataacatgaatcaaacaaaggacaattaacatgaaacaactagtactaccaatcaaagacagtaatgttctacatgaagttgaggatactttactccataatttcaaagctggccgccgtaattacaccatcttccaagttggcaaggctactctgctccgagtgtctgatttattagctctgagacgcaatgaaatcttcaataatgatggaactatcgctaaaaatgcttatattcgtgataaaaagaccggaaagcccaatattttgtacttaaaaccagtaaaacaggatctaatatactactttcaatggctaaaccaaaaaaatatctactccgaatggcttttcccttcaactaaacacccagatcgtcatattacggagaagcaattctacaaaattatggccaaaactggtgatctgctcggtattgattacctcggtactcatacaatgagaaaaactggagcttatcgggtctacacgcaaactcattataatatcggtctagtaatgtcactcctcaaccactcatcagaagcaatgaccctcaagtatttaggactggatcaagtcagccgtgaacaaatgctcgatgaagtgaggttcgattaagatttttcacctattgttatactcaaatattgtcgatttatctggttgatatttatcaagcattttagataatattttttctaatggtatcaaattttcctctaaccataaggcatctggaggcaatacatacacctgttctctttcgggtattttactatttctcttattacgacgctcttctatagcatctaacacataattatgagcactaataagatttccatgaatatcaccattacctttaatagtaattgaattgcctggaataaagtcttctggtttataaccagctaattccaaaaaataaattgcttttaatatccataaccgatattggtgcttaactgctaaattacttggtaatttctccatattattcaaaacttctttcttattttattctactacgtaatgagtaaagtttactaagtgtataaaaagtattgcttaatcagcatacgtctttacatatacgattaaatcgtatatactgattgtggaggatatatatgtgtaataaagtaaaatttatctttggtcagtcttttatggaacaatggtatgcttgtggcttaaccaaagaaaaccgacaagaattaattgatgatatttcttattatctacgtaatgctccagataataaccacggtaagaagtttcctggtgctattattgaaggaactgggggagctattaaatatcgcttcactccagataattatcaaaagggcaaaagtggtagttttcgaacaatctactttgtttatgatgcttcaatcaatcacttattcttcttgacagtttatcctaagaataagaaggccactttatctaaacgagaaaagcatttaattaagaaattcattgaagctaaaaaacgtgataggaaggagaaataattatggcatcaattattgaaaattcattgaaagaataccaagactttttagatggaaaagatactaacgtagaagttattgaaacatctattcctataaggccagaatttgacggtaacgttatcaaaaatttgcgaaagcaaataaacgtcactcaaaaaggtttagctggccttattggtgtttctccccggactgtagaatcatgggaaatggatcgaactgaaccaaaccgttcatcacaaaaacttctaacccttttaattagaaataattccttagtaaacgaactacgtttaatctaaaataacttaaaggagaaatttaaatggataacgattttttagaagaaatgcttgaaattttaaatccctacgttggtacagaagaaggtagtggaagtaatgaaggggccgtatatggaaactacatcgaatggcccgacttagaaactcttgaagacgatcaactaaatcaactagcagcttattttgatattgatagtgataaatatagtgaagatgaattagtagaccttttacgagaaaaaggagttcctgagggcacaagttatgaatatgatgctgattttcctgatagtgcaaagtactataattgttaaactaaaggaaacctttttcactaaaaataaattgattaatatttcaataattcaaggaggtaattataatgagcgaaacagaagaactaaaagcatttaagcaaaagctcgaattaaaatatggtcgtttagcaaaaaaacgtttagcaaagttatccaaagttgctaagctagataaacaattaattgatatgactgataaagaatttgatcaacaattaaacaattggtttaatcaagataattccaaaaatattcatggtgaacaacaattacaagaacataataatcaacaaccattttaaaattagagttcattacgtaagttttgaactcttttttaatcttaacttttttgaaaagttaagcaactgtttgagcccttttcgttgatgaaaaagtactttatttatccaaacttgtaaccaaatttggtcggtgttcggttacctttgacgaattcaaaaggtaacttgctgatgaaacttgcaagtaagtttctgtttgttttgtttactttttcgacaaggaaaaaagtaaattgtcttggctacttcacaacaagaagtagcactaaaagggtcaagggaaagatgtaatctgttcctgcaagcaatacaagtgtcactaattaacgtagttaatgtgtacacgaagtaaactgcttgctcacgctgataagtgttataatttgaagtgagattgggacgcttgactgtaggtcaaaggacttttcgaactctcaaattattcttgatgtggaggaattataatggcgaagttggtaaacaaacacattagaattacggaacagcaagaccaacacttatcagcgttgagcgccaagacagggtataacgtcaacgaactaattcgtaaaatcttagataacgttgatgacgttaccctgacgacagcgctcagtcgacagcaagcaactgctaaccgtgaaatacagttacttgctagtcgaaaatacattatggatacattatcacggacacaagtatttaataatattaatcagattgcccactatattaataagtatcctaataatgatttaggaaaggaattggttaatacatttaatactgtaattaaagagatcaatgaattacggagtgatattaatgagcattgttaaagttattagttctactaacgctggtgcaaatcttaattatttaattaacgaaaaggcacataatactgaacttactagtcatcgttcactaaaacttaacggacaaaatgtatatagggactatgccaataaatttaattcccggtatcttgctgatcaatactgggcagtcaggcaacgagctaaaagtccaaataaaaaggttcaagttcaccacttgattttcagttttagtcagcaagaatttaatccaactaaacaaactctactcaaacaagcccagcaagcattaaagttagttaatgattttttacatcaattattaccatcaactgctcaatatttagaagcagttcagtgtgactccaaaggtaaaaatctacatgtccacgtttcctgcaattcgattcttaccaatggaaaagtacttgatactaatttgattagcgttaactcccgaactgtaattaaaaataaaaacaagttcattatctcggtattcgtgatcaatttgataattacatgaccaacatttcgaaaaattaactggtcgtgaattccatcctgttacaaaagataacaccaatctcgttaactccaaagccgttaaaattgatgaacgtggtggttacatctggaaagaagatctaaaagaacgtattcttgatgccttcaataatactgataattttgaagactttgaggcggtcttagaagctgataatggggttaaagttaaacatcgtcgagcttcaattggtaaagatgaacacggcaaaaagatctatcgtgatgccgttacgtacacttttaccgatataaattctactccccactcagcccgtgattttgcctatactaaaaatggaggtaaacgaggtcttggtctctcatttacgccacaagctattcagcatgagttcgagcagcgtcaggagaaggatcagcagattgataaagaacaagctgaggctaatcctgacacttcacagcaaataaatgctgaaatgcaacaacaactgctattgcagcaacagattaaccaaagattgctaaacgaagaaagtgaggatgataattatggcaatcaaacgcggaaatcagtttcagtccaaaaatacgaatcaggaggcaccagcacaccagctgaattcgacacaagggcatatgacgccgaaacccaacggcaagaatctgacaacaaacgtaaacgagatcaaatcagacgtcaaggctctaaggaagcaaacaaacacgctgaacggccaagccagcaacaacagcaagagcctaacaagcgtccttcaaaaccaaagcacgatcatcagccaacaaacaacaatcaggaaccaaacagagttcaccgctcagaaccaggacaatctgaaccaatcactgagcaacaccaacacgacactgaagggcctaggttataaagttgataacgtccgtggtgatcaatcactgttacaatcactaattaaccgtgttaatgcgttagagaaaaagccagatgagcaaaaacggttgcttgatgaatacgtccgtaactgggattctctaacacaacaagtaggtaagatccaggatggtcaagtgcaattcagccaatcggttcaaaggttactaagtagtatggcttattatgtaaagaataagcaaattaccgttgatgcttcaacaatggaagcattacgtgaagtcgtagaagctaggactaataattccttgataaatatgttggaaaagttcaagctcaagcaattgatgctaacttccaaaagttagttaatgctatcaatgctcaagaagaaccaattcaacaaaaactagatttaattgatcaacgattagacggtatagatgatcgagtggagcaacttgatcgtgtatttacaatactaatgtacgtaacctttgcaatgcttcttgcaggagccttcgcaggtatgacactttggatcaacgcactcaaccatcaccccgtattagcttg

SEQ ID NO: 46 - DNA, 27631 bp, synthetic construct
  misc_feature 1..27631: note = Based on Lactobacillus reuteri
  source 1..27631: mol_type = other DNA
cttaaaagaaaaggaagatggctatgctgatttaactaaatattcgaggactgggcgtgggtacgatggcacaacgagaagctaatatcgtgctagatgacttctatcattttctacaagcagcattaagtgatatgaaatttatcatttgtccttttccagttgatactacggagcaaaagatttattggggaaaacgatacaatcggaccaatattgcgattagtcaagaaaccgatcctagaaggaaacatcaattgatgacgcaattaaaatacattcatcaaactcagcgaagaaatatgttggtagaaaatcaactaatttcagaagatttcttcctattattatttggaaaaactaagaccattttaaggaataatcggaatgcagcaatgaattggggaggaagtgctttatttcttgaaccgctaagcaaaaaaggaaagaagaagttttgacacgaattaataatcttaatacgcaacgatagaggtatttataggtatgaagaaaaaagatattttgcattatgaaagtttggtttgaatctagacttcttagcacgagtacaaccacaggggaatcttaaacgtcatgctcgttatttagaatttggagacggcttcctaacgtgcttgagaatttataaatatccctctaaaggaatgtccccgttctggggcgttaatctcacaaacggtccatcgactttagccgttatttcggtagggactgaaaatcgtgatcagattgttaagcaaatttctaaagctgcaactgaagaagcaacacgaatttcatcgaaagctaaggctctagataatgttcaatctgcaggtaattacaatgatcaaatgcggttaatgcaaaagattactcagcaagcgaagttatgaagcgaatctactttcgaatttttgtctatgcgccaactttagcagaattagataagcgtgttcacgatgtaattcgtcagaacggaatgttccatatggctaggtatgctgatgagcagcttgatgatttgaatccatctttgttcctacaatgtctgaagaagagatggggaataaaccaattggactcctattgatgctgaaaatttatctggttcttcccatttaatcacgtgaaattgggaggaccccaatggctcttactatggctatacgcgaacaaatggggaagttatgttcgatccattccaacgggataatcgccgaactcggtcatttttctttgtaactggtaatgctggtatgggtaaatctacattgctcaagaaaatgaatgatgatgttttctcgagaggagcgattattcggaattttgatgtttcgtctgaatatactgatcaaactaaagatcaaggaggaattattattcgtcttgataaaccagaaaacttaattaatccatttgaggtctttcctacagtagttaatgatgatgggacggttgatgagattaactcgatggctcaacacattacaaaacttactaacttttttaagtttctttgtgatgacgcaactggtgatgatatgacaattttgtctcagtggttaggagacttttacattgatcagaacttatgggtagctaatcctcgtaagaccatgccgaatatcaaaattaccggccttcctcatgatatgtacccaactttacaggattttgtaatctatgctgctgaacgcaagcgtaaagcagaacgggacccaaagattcatataactagcttaatgtcacaatcaatgagtcgcattaccaatacttttagttcaattgaggaacagaaaggggatatgtttgacggtattacacgtttccctgatatttcgcgagaacaagtagtgaccttcaacattcaagggttattagcgcaaggacaagcagtatttaatgctcaaatttactcaattttaacgttattatctgcagatattgtaaaaaacggtatgcatctacggcgattattaaagaaggtcgattagatcctgactttattccttggtattacttaaatctagacgaagtcgaaaatattgttaatcctaagttcgcctatggggttgaatttctcacaatgatgatggaacaaatgcgcaaaaacttttgtgctattacgatggcggcaccaacaattaaagatttgattataaatggaaattcgcatgatccatatatcattgccgtacaaaaaatgttttctttatttcaaattcgcttctttttccaaatttcagatgatgatttgccacgactaaagacagcacttggtggatcagtcacaatcgatgaactacaaggattaactaaacttaaaaaaacagaatgccttatgaatatcaacggggatcgtaatgttcaatttaaagttcaaatcactaaagaagaaggggatcggtatgggggtggtatctaatggcaattcatcataacaaagacaaggagaatactaagccctcaaaagaacacttattaagacgatcaattcatcaagtaaagtcgtttaaagaaaatactaataaagttgttcatcaacaggcgcaaagactaattgaagatgacgacgtacctaattatcaggtaccaaaattacaatttttattagttattttggcagttattgtggactgattttaattgaaaaattactgccattgttataaaagaggtgattctatttgaaaaggaagactagaattcatctttggagcattattatttcgattgtaggagttattactttattattatttgcagtttccttaattattgcgatgctagtaggtagcgacgaaggctgtgatagtagtattgataccgcaacaatttcggctggcggtattagtaatggaaattggaaggataaaaattcagctgagtataaggcagcaaagactatttttgaaaccttaactaaaaagatgggctttagtggtgctggcgcagcaggagcggtcggtaatgcaataggtgaatcgggacttgatgtttggaagccaaatggagttggttataatggcttatttcagtggagtcaaaatcaacgcctaattgctggtggaattattaagagcgtagacccaagtgaactgactcttgacaatgaaattaaactaatgcaatacgagctaaaccatggttataccaaagtaaaaacatcggtagggaaagcgacagatgttcatcaagcaacatggaattggtttattgattatgagggtatggctggtaatgaaaatcaatacggccaacaacgtgatccgggagcacaatgggcttatcaggagtttggtggttcaaacattagctcaaatgatagtctcttaaatggtgctgccgctactgcagatactggggttgctcaggatcaacaaaataatgcgtgcaatactgatggtggtgatacggctagtggtaaatgggggtggccatttaagactattcctaaagatggcccaactagatatgaaaatggtcaacaatatggccataccggaatgattcgtggtggtggaaatgacttccatgatggttacgattttggttcagcgattgtaggagctggtcaaccaattttagcagtgcatgacggtaaagtatttaaggttgctaacgatgttggctggtggtacgtctgggttaaatcttcagatggctacaatgaagtttatcaagaagcgtttaacagtcgagggatattacagttaatgaaggtgatgaaattaaagttggagataaaattggaactttaagtggctcgcatctacatttaggtattaccaagaaagcaattacttcatcagttcaaagcggatattctgatgacggaacttggcttgatccaatcaagattattaaagaaggaataaataattaggtgatagaaatgaggaaaatgagtccgaatattttattatggataattgcgattctgtgtgtaattgctactgttctaagcataccgagtcaaaagcaattaaattattacaaagatcaattaaggattactaacaaccaaatcaataaggttgaacaaaatgaagcaaacaaattatctattaacgattcttttaattactattcagctgaaataacagcttctaagaaactgcaagaaggattaagcaaggttgttggaggaatacactcaaatgatgattggaatgctaataagacccaaattgaagaagatttaggccctaagttagctgagcaattgaaagtatataatgtcgatcctaatactaaggaatggcttttcaaagaaaataatggtgtagaaattggttatgggaaagttaaagttaacaatcaggtgcctgtgactgcggtggttagctttaaaactatggataatcaatctgccgtttatctaattaaaatgaattatgatctacaaaatgagaaggtattaaattatcaaaaaattaaaccagtgactaagcaagttatgaacgttgagggcggtgattaatatgggtaagaaaatatcctcagttataggcttgatagtaatcattgtcagtctaatttgtttaggaacatttaagctacagcagattcaatacaataaagaaacagcgaatgtcaagcaaatgttaaatcaacgtaaaaaggtcttaaaagaaagacaaaaaatagcccgtcagagtgttcttaatgagaatttagtaagttctaacaaaactaaatctgaaaatacccaagcttatgaagctagccaagatttacaagcaattactaaaaagttctttattgagtattttacttatgatagtcaaaatacttatattaaacgtaagaatagagtacatggaattgcaactagttcagtgctaaatgataagaagttgttcaataatggccttgataaaactggtcatagcataattgatgcagaacaaattacttcatcttatgatggaagcaatgcttatgtgagtggtatagatcaaaagcaaattgttagtgggattgttgaagtatcatattcttcacgtaaaggttctcatagttcttctaaaacaaccgatatttacttagtgaaatttgatggtaatcaaagaaaattgattcaaattcaacggattgggacaattggaacagttgttaattagtgagtggtgatgaatatgacagcaaaaataagaaaatatgctttatggcttaaaggacaaagcctaaaatttaatgaatgggtaatcatatttggttatgtgctaatttggctatatgctggcatagttacgggaattgaaggttcatatttgctagctggtagctttactttattattaatatcctatctattatggctgcgtcctaaaattcgccggctttcctggaaaaattttgtggaagcactaggcttagggctattaccattaatggttgaacttatatttttactaattgtaatacagtttaataatcatataattggtaattcaaatacatcattgattgtaaaattacttcaaaaaaatataatctatgtagcttacgtagtgataattgcacctattttggaagaaattgtctttcggaagagttttttccatcgtgtcgatgcttggttagcatcttgggttgataattcaaaattgagagttggaattagtgcatttatagttgcaacagtgtttgcgcaaatgcacggagcctcaattgggattatctacattttattgagcttatattttcaatttatttatttacacttcagtaatctggaaatgaatattattgcgcatattacttttaatactagtacattaggattgatgataatggcaagcttaatgtagtaaatgaacattgtctaaatttggacaaggttatcttataggctataaatgatataaatgtgaaattaaggcggtagaataactatcgtcttttttattatctccaaataagattagtcccttgatggcagaacttcacttaattgaaattaaagttactctagttatatcaaatctttttgcttatatgttattttgtctagttattgacacttaaaacaaaaagaattaatatataagtgttaattgttatatatattgaaatttataatttagttagcgaatataagtaacaaataagtttcaatatgacatctatgtagcgaatatattttggaggtaatcaaatgacttataaactttattttgcaaatgatgcaggaaatgactcgttgaaaggaactctctttactagtgatggtacagaaactgcaaaacaaatttttagtgctggagaagatatagaatgtccttcagtaattgctatgaaagattccttagatgtaactgctcccgttgaatttagctcagaagcagaaaaagatgcttatatggacgatttcttaaaccatatggatgtctctattactagtagttcaattagtgaagcaggacgatttttagtcggtcaagcagctttagatagtacaatgccgttaacgcattttgattacaatgacttatcaggaaaatctgaagttgaccttactttgttacttacattaagcaatttagccggcaaaagagtccaggatgcttataaaaaaggagaagatttagataatcagttaaaaatggacgtgtatatgacaactgcattaccaatcagtgaggcaaaacaacctaatgttttaagaaactatcgtaaaagatatatggataatacgcatattgttacatttcacaactttaaaaatccaattagtgtatcgctgcagttcaaaaatgtttttgtaggattggagggagaagttgcttttgcggcgattaaaaattcgccaaatgcttatcctgaattggctaatagcatcattaattctcttaaagaaaagtatcctaaagtagcagataaaattaataatcaattcattaaaaatattaaagatgcgataggttttgaccttggtggtaaaacaagtgactgtacagtaattactaatggaaagccaaatatcatggcttcgaattctattatgcgaggatacgataatgtccttcaacgttcggttgattacttacaaactaagaattatggatttgataatattcgtcaattacaaaaatatcttaatgaggatgaaaatccatttgcgccaggcagtaaagaaaaagttattaaagtagtaagttcagcagcagagccttttgctgatgagattgtaagtaatgcttctcaaacactacggaagattggaacaagtattaagattgggtttgtgttcggtggggctgcagtaccaatgaaaactactcggctttatgagaaacttaacaataaatttatgagtttcaatggagatcaaataattccaattgtttgggtcgatggatcatatgctcaggtattaaataggatgggcttagttttaattttgaaagcattaatgggtcctaaagaatgatatagattacaaaatcctgttataatgatatgtatatataatgaatgggagcgaagcatatgccgagaggagcagttactaaagcacgtaatttacaattgtacattgaaggaccagtaaaagaatggatggatattcaaaactcgcttggttcatctattggccaatccattgtatttattactgcattgtatggggaagtagatttaccttctacactccctaaaatacgagcaaatcaacaaatgaaatttaataatagtaatttaaaaaatggacaaaaaagcgacaatatccaaaatggaaaatttgaaaccaagactaaaacaattagaataccggactatagtgaagttagcgcttggtttgaagcacagacggctcctagcgaatcagtgaatcaattaatctttttagtcattggtatgttcggaattactgattttccttgcgccttatctttttcacagggtgaaataattagcgctttagagcagtctttctttaataatccgaaagagttaagcaaacaagatagttttcagactaaagaaactaacaagcaggaaagtcaagaatcacaaatgaacgctgatttatctgattcatctaatattgatttatcaatgatcagtacagatttagatgataaatagtcgaagatttgaaacttaaattttaattataaaatataaacttcataaacttgagtttatgaagtttatatagttagaatagtaatttttagctgaatatatttttacttttcaatataagtgttaaatattacttatgttgaaacttataggttgatataaattgttagaattttttcaggaaaataaagtagggattggtacaatgaatttaaattctgattcaactagattaatcaaaaattggcttcttaaagttcctctagatgaattaagaaaaaagattaatgaatgtaaaaatcagtctgataaagaatggtgggaacgcatttataaaattgctgctcagcgaagaaagtaagaaaaactaaaaagtgatcgtgtattattagataatagtgaaagaagggagcatagttatggcaaataatacagctttagctcaatttattgcctcatttgggagtttgaatggttatggaagcacagttgctcagacaaaaaaggctttagatacaggaaatactaatgctttggaacaagataatgaggatgtaccaatctttaaagatgctttagctggaattaaagcagtaaaaaaagatggttttacagttgatggaattattaatatcaataaatcttttgtatatagtaaggaagaggatccggctattcctggtcatttaagaaattcaatgtataatccagatgataatattgcaattacaattgatacagctggaaaagatcattattttcctcccgaagtagtttataaagctgatttacaaaagattattgatgagtttaagcattctgcgcaaactaaacaggatgcatggctcgtatttgcaaagttagcaaaattacaaccttttcaagatggtaataagcggacagcgttaattgctgcaaatgcagcctataatgtttgggagaaagaaaattatttagtcctaccttttaatgaacttgatcgtgctgaatttacaattaacttaatgcgatattatggagcaacagatcctagtaccgaaagtaaggctttttcaaaaatgctagaacttcttccaaatgataatgagcaaatttatcataaacatattaacgaacaaaaagctttaaatccgaaaactgtaaaactaaaacctctttttcgaaatgatcataaagaaatgcggcgatgaatgaataccaatttagtaaacactatagataactaatctaaattgatatattgggttatacttaagtaataagttagagaaactttgtgaattgaatgattttcccatgggaaaatcatgggaaaaaatattctaggtttctcgatatttctcattaaatctcggtatttagtcaaaaaacataacgtctataaacgttgaggaatcaaggaaaggattgatatatatgagtttagatacagcgatatttgccggcggatgtttttggtgcatggttgaataaatatatcgagaatggcgctatattagtaataacacgttgttaaacaccttattttaattccatgggaaacttatgggaaaattttatttatctaaagaagagatattcttgtgaataacaataatttataaaagaaaaagcgccaacaaaagtcagcgctaagattactacttgagtaaccatttaattagatgtttaatgtgcttactaggcacaatgagaatcagtacacaccaatgcaagggagtcacctccaaacttgcgcttagtaaagattgattaagtcttcggtgcgcttaaccattgtatcacaatttatttatgttataatatatacatgagaattagtacaccggtgtgcaaaatggtttcagttgattacttaaaccgaaccggttggggcgcttaataggcgctcttttttatttacatttaaaattttaaaaatatgtgaggtaattaatgatgaaaagtaaagtgttaaaagaaaatggtgaaaaagttaatgcaaaacattatcaatataaaatttttttgagtaataaaagtgaacctattgaatataattcaactgaagcagtatattcatatgaagaagtttttgaaaaaatttgtgaaaaatatgcaattaagctttctgaaggaaacattgaaaaaattgaaatgtcattagttgattaatatgtgttgagatttaataatacaaaatttaatgaaaataagcagcaagctttcaatttaaattggaagatacttgttgcttatttttattcagatagggcacaagaaagcaataaatgatatgacaaaaaatcttatgaagtaacaaaagaattaagtagttagcataacctatttactttagaattgcatagagatatagctataataaagtttgttttgataaacgagagtgtgatatagtgagcttgataagttctaaggattatgaacatatcctaagaataaatgactttaattaactacttaactaaaagtagaaaggaaaacttgatcggcgcacttttttattgtttaagtggaattaaatttttattaggtgagaataagatgaatagtaataataaagcaataacctcagtttcggagtttataactgaaatagaacgtcattattcagacggtaaagaatatttctttagaggagaatcgaaagattatggaacaattattccaaatttatatcgtgaattaaataagcttatcgatgattcaactaactactataagcgcttatctattgaacttggaatacaaaatacagataatatctcagttattgatcaaatggcgactcttcaacattatggcgcaaaaagtagacttttagatattacaagcaatgcattaattgctttattttttgcagtagaaaataccgatgaaaaagaagacggcattgtacatgtatttaatggcaaagttttttttgattcaggacatacaattgctaccaaaacagcagctaattttatggatatttctttaataaataatttttataaatattgccacaccttcttaaacagtcgtaaatttcctaaaaacgtaagagaagctattatacaatgctcaacctatggtaacggtttggaatatgagttaaataatgtagaaccttatcccattcataatagtgcaaatgttatagctgagttaaggcatatgacaacttctgagatgatgaaagaaatgccgagttttgacttgattgattttatggaaaaattgaatcaaatcgcaaaaactagagaaaggttaaataaaccattagcaatattttttgatatgcatttacctcagatttatttaagtacgtttagtaatgacagaataaaacgtcaacaaggagcatttataactccatcaatactaagtggtcaaaaaagagataactcaaaaaaacttcaaaagtatatttattcgagcttctataaagcagaaaacaatttaataaaagaatatgtggagttaaagaaaagactagttaacaaaccactagttcataacaagcttcccaaaatagtgttaaaaaataaaagaatgaaattagacacattagtaaagtctaaaaaggagttttctcatcaaaaagagaaaagattaataaagttaaaacaaataatgcataaatttgataattatagattatctggtagtgatttaaaacttaaagaagactttaaatataattgttttcagttgatgtttgacgtgaattatgctggttatcgccagtccataacgtactctgtaaaaaagttgaaactgggttcgataataatagatgggagtagtaaatttcaaataaaaaggacattaaatagtcttggaattaatgaagggacagtatatccagatcttaagcatatttcagattcaataattgaaaatcaacattattaagataatgaaccaattttaattattgaatgcatagccggtttttcatgtggaaaatttactgtatttatatcaaaataagattacataatatacagttttactaataaatggtagtattatgaactcataagaaatgaattaagcagcaagccctctacacggaaggaaacttgctgcttattttttattcaaatggggcacgtttagttggcatctcttttccagtaaagggatcatacatagcccatttatcccaataatctactaattcttggcggaatactttctgagcttctgaaatagaaatatggtcaatccgggagattcgttttacataaggtttccattcttctggaatttgaatactgtctaatgaagcttcttcaagaatatagcctttgaaatcttctttatatcctaaatgatcaaacaagagtttacccattacatttgcatcgtgaataatcttttgggccgtttcttctgtatagacgagcgaatattcaaggggggcttcgttaataagatccgcagatttacagaaatatttattagtatgagggttcttcattcggtataaaatagtcataaaaatagctccttttaaacgtatgttcgatattaatatagcatagttagtcatttttatcaaacatacgttctgagcaatggattaagaaaatgtatattaaagcttacttaacttatcagccaaagactcttccatttctttagtaacgtgtaaataaatttcttctgtaattttactattttcatgtcctacgtgattttttataacgtataagggaactccaagttctgctaattttgaaacatgagtatggcgaaaaaaatgtgtagtaacacttttatcaatttttgctcctgcttctaatcgatggagaaaacgatctaaatgtgatgcatcaaatggacgattacttcgtgaatctttattaataaaaatcaagtcatttggatctttattgaggctaagttctttataaatattgacagccttttgtggtaatagtacttctcgattactagcaattgtttttgcaccgtcagttttcttgactgaaactttaactgtagggttacttacagtccctaatagttctcgttggtgtgaaagggagccatcaataattgctttatacttaccttcttctttaattatgtcttttacataaagtccggccgcctctccacaacgcataccagtcaaataaagccactctaggaaaagcttgatatcattacgatcttttttctcacaagcatgaaggattgcgtgatactcatcgtcagtcaaatatttattttcaatacgatcacgttttcttttaatttcgcttcgccatgttatttcaacatctttgaccggattctttttaagatatccatatttaacgccaaatttatatgtcattgataagtatttcttgtaattttggattgaagcattggttaaaggcttatctggatcataaagcttttgatctaaatagcgattaagtatttctgtagttattttattagcaagggtatcgttacctaagtcattacaaatccgtttaagccctcgaaaggcattatagtaagtgttaaccgcaactctttgtttatagatagttaaaaatttgtcagcaaggtttcgaagtgaaatatctttatctgtgaagtattccttttgcttagctttttcaattttttttgccagctcgatggctgctgctcttttagtttgattattatttttaagataactaacagagacttttttatactttcctgttaatggacttttatagttttcgccaaaacgatatctaactttgccacgtacggtatatttttcaacccacatttttatctcctttagtttatattgtgcaaaacatacgttcttttagagtgctaaataaaaacgccagtagaagaaatagctaattctctatattttttgcgcatcgcaaataatgtaaaattagtagctctatcaacgctttctgtcattgaaataggaattcgaaaggcttcaattaattgctgcttagtctcaaaagtgatgtcgtgtgtacggcaataatctaaaagcaacataattgcaattagatcaccatcgccttcggctttttcattaacactgcaataattacaactaagactaacttcatcaccagataaaatgtgtccaatttcatgagctagtgttagtggtcgttcgcaagctggaaaccagttaggattgtaccaaacgcatcgcaattcaatttgcgattgtggtacccagtcacttggccattggctttcagtaaggacagtaatgttatgttccttagctacaccttttaaccactcaataagatcttccatcttgttcatcaacgtcaccttttttctcatcaattttatttatattcagttagtctatgtattgtaattattatttttgcttattttgtttgttattcattgccttttgtgattctaaaaaggacttaattgaattgcgcataaatgctttttgctcatcgctaatttgaagtccttcgtaagaacgtaatccattaaaataatgatcaatatcttcggaagtaatatcaccatttccgttattagtattttgtacttcttctgggtgccggcgctccttcttatcacttacccccattaaccatccttcatccacatttaatactttagctagctcatataatttatcttgcttagcttcatattttcctttgaggtagtcggatattagttgacggtttataccagttcttctgccaagttcggattgggaaatttttgcatcatctaatgctatttttaacctatgctgaaagctgtcaactttcctaatcataattgtttcaactccttaaagctaattttaacattaaaatacaaaatataacatattgagtaaagaaaaattgacagaaaatgattgtaattgcaacactgtcatgttaaacttgcttttgtaaagctaacatgacaaaaagaggatgatttatttgatttttaattatgataaactgaaggatcgaatgcaacaactgagatataatcaggtatctcttgcaaaagctacaaacattgagcgagtaacattaaatcgaaaaattaataataggattatgtttaagcaagacgagattctttcaattgcgaatgcattagatatagggtcagacgagataggtgtatatttttttacccttattgtcaagaaaagatgacaggatatttaagaataataaggaatttgttaattcgggagaggaggtaattctgatgatggcaaacggttggaagagtagggaacaaattatgaaagattatggctatagtgaaggaacttttggtgatcgaatgcgtgaatgtcttgaatctccatacagcagcgccgttgttagcgacacctctaagtatgcaattattattgaaccgctttatcagaagttccttatgtggcgatcagaaaaaatccgtaatgagaagtcggaaaaatcgggtcgtttaactagaggtaagtatgattaaaaatataaaggattaatcataaattggcagaacttggaaaatttatgagggtactcaaaaattgaacaaaggtgataaatgggtgtggaagaatattctaaacaactttcgttacctagatgaccttaaacggatagaggtaaaaggaactacttggaaaccccatagtacttctccttgaatgtttaaggcaataacctttgcacaatggttgaaagagtatttaagcgagttttcaatgaatggaaatggataacagtaaaagaaagtggggtaggtactatgcctaaaattataaagattaaacataaagcggttaaaaatagccaaattcaaattcctgactatgtatttgatgagggactaactctagacgcaattggactgtatatttatttactaagtcgcaaacaaaaagaggttagccttgaggatattaataataaatcgagggattcacaagagcataatttagaaatactgagtgaattggaacaacatcatttaattgctaaaaaacttaatagcaaggctaactttatttggaaattacttccggtaaagcaggtgtagttttatgccgaaaattaagcatcgaagacgtcaagggtattcaactgtaagcaatactccatatgatgaccgccgtctgcagctcgaatcaatgggtgtttttcaattgctatggcacttacctgacgattggtcatttaatgagattgatattgttcaacgttcagcttctggtagaacgaagctccggaaagcgttagacgaacttgaaagatttggttacttaaaacgaagtcgattgcgtaacgaaaaggggcaattaacagctggtgattgggtattagatgatttagggacacttggtgataattcagttttggcaaaaaagaagagaatggaaagaaaaaagccaaggaagcatcaagtaaaattttactcatgggttcaaaagcctatgttctgttttgtgacattggcttatttctcgccaaaaacctatgtcacgttttcaaacataggtgtattttatcgaaaacctatgtcacgttttccaatgttggataacgtcctactactaattactcatagcactaattactcagtaagtagtaagtatgctgctagcaaagcagcacaaactgatgaacagattcttgcaaagaatcgttcagaacattcactagacgatccaaaaggtatttcacaagcatataatctctggaatgatatctggggtaaaccttcagcgttcgtcgaaaagcaaattagccagtgggttaatgaatttggaattgacgttgtcgcccatgcctttaactatgccaaatggaaagtggagcaagcatcagcagcaggctcctacctagcaaaggtatttgacaattatcggcaaaacaacgttcaaacagcttctcaagcagcagaagctgatgcaatgaatttacatcgttcaaagctctcgcaaagagctaagcaaagcgattctactactacgcctagcaaaggcaaatcatctcgcaaagatgatcttaaaaatttaataaaaagcgaaccagaagctatctgttaccgagcagcatgtttagcaaaaatcaatttaagcggagcagaccagcaggctcttaatgagtttgtcaggcatttaggccctaagctagtcctaaatgcgattgaggttgctaaacaagaaacaaggtaccagtacccttcgtggggctttctcagatcgattttaagacgatatgaggctcagggaattaagacggttgaagacgttaagagcggtgatcgaaatatgcctagcaaaggtaattcaaagcaatataagcgtcataagccgattaaagagccaatgccagaatggagtcgaaaaccgcaagaagagctttacaaaaaggcagacccggaagcaatacgtaagcttaaagaacggattgctaatcgcaataagcggcgaaaggaagtttctggttaagcaagttggggaggattaacgatatggggacgaagaaacaagcgcaaattattactcgactagctcacttaatcacaaaaagaagtgaacggctaagtaatcaagaaagtctgtcagctagcgtcagcattaagcttacacaagaaattaagacttactgttttttgattcgcgtatttcaggaaaattaattcgagggagattttgaaaatgaatggggataaattgattgacaatattttgacgatattcatgcttttagggatttgctgcattctagatgcaatattctttgccatcatcctctttgcgcctttaagaaggtaagcgacgatgaaacatttgaattgggctgcaattttattgattggctgggcgttttactttcagatttttttgattgtggcgattaaacggctaattgaatttctgagcgttaacacagttttatcggttttgggagcattgctgctcagcactattttaggtggcaccctgatgttattgattattcaaaacgaaagtggggaatagagaaaatacaatgaaaactgtgcttatttggacttcataggaggtgagtttgcagtgaaagtaacagtgggtcatcacttacttgaagcgtacccagttgaaaattatgtttatgaagtatcatattgcggtagaaaagagttttaccaagatgctttggacgctgctcattcaacgctttacacaaaagatagttcatataatgcaacaattactaaaattccagttaggcctattagtgaaaagagaattgagaagagactgctacatcaaaagtggagtcttgatgactgggatccatcagcggttaaagaattcaaacaatcaaaactttatctttttagactgtatcttagaaaaataggtcttattccattattgattatgttatatgttgcaatttagattgtcttagcaatttttaagtaaagattggtcgaggaggtaacaaaatggggaaagattattcattaagctcagaattatgtcttagtaattggactgcagaaactcttgatagttctgtaaagcactggatgaaaaacagaaatcagctgtcaagtgcaagcgcttatgtaattagcgatgaagattgtaattttctgaagattgattttgaagatccagtaaaacaagctgatgttctaaaaattaatcggggctctcttggtttggcaacagtatttaagactattcaatctgctaatgctgtcataagttttctagaggctgtaggtgttaaaaaaataaaaaatttgcaagtacgaaagctgcaaggtttattgtattaggattgcgaaatgagggtgagtatatggaatttaaagaacaagaacggaactcgcttgaattagttagccaaattttaaaagatagtccattcgatggctgggtaatcgtagcacaatctccggaggaacaagatatgatttcaatcacttctggtggtaggggaatttcacatggtgcgttagtgaatggactttatgattcagcaaaccgttttgcacaattaaattttaagagtgaaattactaagactgattttattttgacaatggcagaagcgatgggagtctcgacggctaatttaaaatcagctattgagaaaaaaccacaaaatatttagggggcttgttacaaatgcaagaaagtaatgcttcacaagcggggtatcaaattgaaaactcgaataatggtttttacccaaataacaaatactgaaagtcaggctgtttttgttcctagtgaactgtcagagagctataaagctttatctcctgaggaacggcaatggtggcttggaattgaacgaaaggttgataataaccggcgtgactatattatccgctttggcacaattctaaaggaaattaaagacaaaactagccgccaaggaaaccgtgataaagacaagattacatttgagcggtggattaaagctcatcatgtttcaaaggggaatgcctataacgctattaacattgcgcaagcatattatcgaattaaggcacagaatgatccggatgaagagctaatgcttgataattatctaagccttcctaagatggcccaattagcaatcgcaaccggaaaggctgatccggaacaggaaaatatttattacatgcaactgtagaagctcgtaattcgcgaatttggcaggaaatggctaagtcgattagcaagaaaaatgagctcgctaaaagtcaatcaaacaaaattcaaaaacttaattctgaaatcagcgtttagctaatcgtttagcagacgttgaaactctcgggctgaaattatgaatgagctgaatgatttacgagaaggaaaaagacacttagaaatgcaactggaggagcaaaaaaacaaggagccggaattagttgaggttgcacctgatgattatgacgaattaaaggctgataaagaagaagctgaaagcttgcttgctgatcgggaagaaaaactcaaaaaagttaaagcggagttaaaagctgctcaagaatcaggacaacaggttgatgatcttgctaaacaagttaatgacttaattcaaaaaaataatgctttgcgaacacagattaagcaacaggaatcagtagaaagtaaacatgacaaagcttttaagcgtgtttcatcattttcatctgaaatgttagcaaatttagtaaaagattttgacctgatgcaagttttacctgaaaccaaattcttaagtcagaaggatttagcccagactgatttagtaaaactagcagaaatgtttgaaagtaagggatcagaaattcgtgaaaaactattagccactcataatagtaaacaagtaattgacggggactttaaggaggcttgagggggagaatgaagaaatgatgtacgtgaaaggaagatttgttaacgcaaatgggcttgaaagaagaccctggtattttgcggtttcctcgaataaattacgggattttaagttggccatgcaactttacaagaaaaaatcagtactagtaatggttagtgatcgacggaaatatgtaaggatagctcaagtggagcctaaaatcatcaaaacacttcctaatagtggaaaatgtgtaggtaatttaattgctatcttaaaagcaagtaacgggcgaccaatcgaattatttaagttagtgcagagttttccagacgacttaaaaaatattacggttgctgaaattgcagctcttcatttgccaagtctaaatcgtaaacttgaccctaatgttcaccaccttcctaaatgaggctagaagcaatgatttatcgtagacgattaacccgagcagaactacgccaacgagctaatcataagatgattagtggatcttggaatgacgaggaagaaaatgagcccgaaacacaactaaaaaacataaaaaatactggtcgatggataacacctattttaggaacctttgtgttgaccttatttatttttttgcttttttggaatttgtatcacttttttcagtgactaaggggacaaaatttatgagttataaggaaaaatcaaatcatgattaggaaaaaattgccaccaaaacggtcgatatatcgacgggagttaaggaaaaaagcattacctaaaaatattctgtataccatgttgttggcatttttaatcttgattctattggtattcttactgctatttgcagcaatgattaagattattttgacttgaacggaggaaattgaagttatgaaagaaattaaattgcggaaatataatcaaggcctaaatcaattgctttattcaactaggttagaaggagaaaacgaactgcgatttaacttttctccttttgatgagggaagttcatggattgcaaatggctcactttccaaaattatgatgtacacgggagttaatgatcaaaacgggaagaaaatttatgaaggcgatattgttcaaataattcatgatcaaaaacctgttataaagcaaactgtcagatttaggtggattgtagaatgaagttagccacccagttggtggtaaataaaaaacgccattcggcgtgacattaggtatcatattaagtgaaccaaacctatatgaaaggatgtccgtcaaatgacgcacttaaatgataccatgtctactagtttattgactactcataaaagaatgctcatcttactaaagaagaacgtgtgatgattgcgactttaaagtcgcaaggactttccaatcgcgcaattggtcgccaattaggagttaatcatcaaacaattaataacgagctcaaccgtggtacggtccgccaacttcgtcgtcaaaatctaatggtaagatttacgaatattcttactacatctatagttatgaagctggtcaggccacatatcttgaacatcaccgccattctggtcgtcgtcgcttatattattcttcaaagcaatttttacgattagctgatcagctaatgcttggtgagtttgacgaccaccattactccccacaagcggtcatttataaggctcgagatttaatgaatgatggcaccctgatcccaaagtcggttgtaacttttatatcaatggattaatgagggtgtgcttcgtacgtccaatttagatctctttgaaaaacctaaacgtaagcatcatcgaactcatccgcaagctaaaaggtgcttagggcctaatattgctcaacgacctcaaactgcggaccaacggtccgaaattggccattgggaactagatacagttcagggacagaaaaacggtaatgacagtgttgtactagtaatgactgatcgcctttcacgagttaatatcacgagtaaaaattgctggtaaaactgcgcatgcagtaaatcagttctttataaatttacgccagaaaatgggcacagatgcttactatcgcatctttaagacaataacctctgacaacggttcagaatttagtgagttaaacacaagttcacgatcatgttttctatgctgatccgtattccccttgggaacgtggatccaatgagatcaataaccggtttctccgcaaggagattaccaaaggtgaagctataaataactatagtagtgctcagatcatagcgactaatgattggatgaatcactatccacgagctatgtttaatggacattcgtcaatggatatctatcgtaaggccttctaccaagagatatcacagctccatcaaccaataatcaattggtcagtattatttatttgagtccagtggctaacttattcttgaaatttaggaactgtcagatttaatcacggcaaatttattccagtatgcgattacaggtcgacggaattaagaatcgttggtaatgtttttagcttaaaaaatgatggtgaaccataggtaaagaaggtgaacaaaattgaaatacaaattaaaatttcaatttgatgattataaaggctacgctgtaatcactttacccaaagaagaaagccttgaggaattaaagcatgatttagctttaggcaaatatcttttgaatgcggaagaaagcactttagagttttcaacatttcaaaaatataacgaaaagcgataccacttagtcctttataaaaataaagatacacgcttaacaattgaaggttcctttaatagtactcatgacttgggaatgaatttagttaaagctgaattattgcaattgaaagaacaaaaacctgtgatgcaggctcaacaacttagctttctgtaagtgatttgatgctaagtaatagattaagtggggtaaatttttaatgaatagatatgatccagaattattgcatcgtcgtagagtgattacttttagtgtattaacggtagccgtcatattgcttataacgggctttctctacggaattggagtgcttcatcgaagtagtacaaaaacgcaacaagcagctcttaaaagcaatgagccggtggtagtaatgtactactctaaaacgtgtccagattgtaaaaaagtagcgattgatgttcataaaaatgcttgggaagtaacagcaactcaagccacgattggtaagttgatgccatcaccatatcgccataagaatttatatttacaatggcaaaataatgaagataaaaggctatttaagcaaaacaatgttaattcagtaccaacatttatggtttatcgcaatggaaaaccacaaccgattgctaatgcgaatggaattgatatttatcaatactcaggtactaataagcaggtaattgctaacatctaccattacttacaaataaataaaccgacagaaaaacagcagggggtaaccaatgaataaaagaaaatggcgaaaaaaagatccaattttggattgataagtatggaaaaagatttgctaaatttaagacttggtatgatgaccacgcgatgcaacgtaaattaattattagtggcacgctctttttaacaatgatagggctgcttgttggcacacgagttgcaccaagcaaatcgcgatttgccgatactccattaaatacagcagagagttttggtaatgatagtaatgccacaatagcactaacttctcgtaaatataatgctaagcaacaattcctggttgcgcgctttaaggtggcaccacaatctggtcaatatatcgatcctaaaaatattaaatttaaggttcgtacattaacaaaacaagatgcttcttatcaagttattcgcttgttaataataactttgtagtagttattgataacttaccgaaaggatacaaagcaattcagctagaagctattaataaacaaggagacagttcgcaaattacttatgatgcttcttctagtattgatccagaatctttaagttctagtgatagcgaactttcatcatcaagcagtgggaatggccagactggagcaggcaaaaacagttacaaatttgtcattaatgaagataaaaaatttgttgataatcgtttaactagacaaacccaaaagaatatgcggttcaatcattacaagaatcaatcaagttaatgaacagagaaattcgaaaagaaaaaggagctttgactacctatcagaaacaattagctgcagatcaagcagcaatttctcaagcaaagaataatcaacaatatcaagtcgataaagatagtaattctgataatattcagcaagctcaagcagatattgcgactcaaaagcagaatattaagaacgtaaataaggtaattaaacaaagtaaattacaaattaagctttatcaaaaaaattgatgatactcaatcaggtaagtataatcccagcaaaggttgcaactaagaagatggaataaggaaaaaagaattaaataaattcaaaagccagtcgatcaaaggctggctttagttataactaataaacatttcatttttagtttaagaaggttgaaggaatgaaagaatgttaatttttttatggataagcggatttaataggaaactggtaatatatctttttatttttttgagcactttaatatttatatataacctaatggaattattctttataagttttcgcaaaaataaatatttagaatggagtgaaatacaaaaactaactaatttgaagatagtttttagtccttaatatgttatttatcattggcctatgaatctggtaagaggaaaggtggtatggatcagttgccgttacgaatgagttctgttagaaaatataaaatttaagtcagactggaataattataatacactatcttttgtcttgatgtaggtttggaaaaaggtattgatacaatgcaaaactagaaattatagcagatattagattgaaatagtcactacttagaactaaaagcaatgaagttataattgaaatgatgaaagaattttggcgatagtaattgctactttaaagcattgtccttcattagaaaatattgaacagagaagtaaataaataatacatgaaaaaatgctcgatcctaaaagtaatacgatggttactacaatccaatatataaaggtcattttattatgggaaaaaccaactactatagaagaaaaagcagaatgctttagaggatgagagaagatttgcataaaagtggagaaaaaattttgagtagatatatggatagaattattccaagaattagtattagataattaaatttagtctttttcacgggcttagtctctctttattaatttattttggcgaaactttgaaaagtatcagcaataaatatactacaaatgatgatgcttttgtagatttacgtgatgcaaaagcgcatttttctgagtgtcaaatagtcggcagacgagagaattggggtaacacaagaaaaccccgccactggcgggtacctggcttgccaggtatcgttttcccttatgctcattaattagactagcacttaattttactgtttaagaattaggttggcactcaaaagaaaggacatgattttatgaagaaaatagatggcgaaacacttcaacattttagattagataataatcaagttggcaaggtgcaaaaggaggtaagaaatataacatgacaaagcagaattttatcgcatggtggtcagtgattatttcaaaaatgaaactgttgcgaatttaactccagaatatatagatacgttgaagcaattaattgaaattctgaacgtaattggtgaacggcaaaaacgtattgaacgatcagttaattattgtgaagatcatttacggatcttttttgatgatacgatggtgaggaggaaaactaacatgacaagaactactttaagaatgacaaaatccactgaaagtaaattaattattttgaagctaaacttgaaaatgatcctgccttaattaaaatattccatcctcaaataatggcctgattaatatgctattaaatgattatcttactttaataattaatgctggaataaaagtctcgaaaaagatacgaaactatttatcaagaattttatcgacgcatgacacaaactaaataatttaattaagcatgaacaaaaaacaaatgaatcgaattaatgaaattctatatttgttaatggcaactaatcaagcagtcgtccgagttgataaagatgactggaaatttaaaaagcatgatcaacagatagcaataccgcaagagtttttccaagaagaaagtgatgatatcaaattctattgatgatcatcggattttgattactggtaatataaaattgcgtggtttaactccagcaatataaaaaaattcttcgttatattctagacaataatgaaaaaacaaccttttttacgtatggtcttggcatccaaggcgttttagaaaatacgttagaaataaataatccggtaaatatcggaagtgtattaaatgtttttccagcaatacagataaattttcagataatgagacaacgtcaattggtaattttgatatatctttcacgtcagaattaaatggggacgaattagtagtatcgattagatcagaaagaaataaaatttcgctttttcagctatatcgcatgatactaagaaaggaaaagatagtaacgacatgaatgagctttataaaaagcgttaaactcgttttaaaaatctagttaaccaggaggaagttgattatgattgctaatacagttaacacgattaaaaatcacgatcacgaaatggttttctgtttttatgtacaatcaaatcaaaccaggaaaaattttttcaagatattgttactgaaactttctatgatataaaatttatatataataatgcaaattcgtcgttaatggatgcaagtaattttaagttgcttgcaaaaaatatgagcgagtattttagccctggcttaattgtgaatgtagaatttgggaaccagttacctatttagagttaaaaaactctagaatatctgaagagaaactttttgacgaattttggaattttcgtgagaatgttggtttgatttgccaaaagacttaactaaaaatcgtcatttagctatgggatagtatttatgtttgattggaaagaatatttaaatgttgcgaaag

SEQ ID NO: 47 - DNA, 22125 bp, synthetic construct
  misc_feature 1..22125: note = Based on Lactobacillus reuteri
  source 1..22125: mol_type = other DNA
aacaactaccgtggcttcgcttgctggactcgttaatcagaacggtttatgactaaacctaacctgattaacgagtgaatttttttggggggagtgcttaatcgaacttaacttcatcgagcatttgttctcggctgacttgatccagacctaaatattttaaggtcatggcttctgaggaatgattaagcagcgacatcactaaaccgatattgtaatgagtttgtgtgtagacccggtaagccccagtttttctcattgtgtgagtaccgaggtagttaatcccaagtaaatcgccagttttagccatgattttgtaaaactgtttttcagtgatgtgccgatcggggtgtttagtcgatggaaaaagccaatctgagtggagattttgttggtttagccactgaaaatagtcttttaggtcttgtttaactggttttaggtacaaagtattgggctttccggtctttttatcccgaatataagcatttttagcgatagtcccatcgttattgaagatctcattgcgtctgagagctaataaatcggacactcggagtaacgttgccttgccaacttggaaaattgtgtaatttcggcggccagctttaaaattatgtaggagagtatcttcgacttcatgcaggatattggaatctttgatgggtaaaacgagttgtttcatgattaattgctccttatttaggggctactttttgtatatataaattaaaagcccctatattctgattgtagaatacaggggcttgacatatcaacattctataggggctatttatcacaaatagaccctattatgaactggtttcagtcaatcttttttattaatctttcaatttgataataattaattgttattacgaataagtcttacagcaataatcaaaagaaatgggattaaagttagcacaaaactaacggtaaatatacttaaatttttgatggtatctttagattgggtcatgaagtccgtcctaacttattggttttgtcacttataagtttaaggcttcatggcctttttggtctagttatttaggtgttgcacttacattgtaaatccggcgtcacaaaaaaattgactgacgagtcaataattcgttgactcgtcagtcaatcgcgactatactggaaaaggttgatcagataccgacatattaaaacgtgtttcaagtttgaccttaaggaggatgacaaaaatgacaacagctattatcgaacttgaccatcttcaaaaaaactttggcaagtttgccgcattaaaagatgtcagtttcacgttggcacccggtcaggttctgggttttctaggacctaatggggccggcaaatccacgaccattcgagttattttaggcttattaaaaaagagtggcggctcagtgaccgtcttcggcaaagatgcctggcgggatgatgcggcgattcatccacgcatcgcctatgttcctggggacgtttatttatggccaaatctttctggcggcgaaattatcgacctattgctacgtttaaatggccgccagcataatcaaaagaccgatgaactaatcaaggcctttgaatttgatccgaagaaaaaagctcgtacctattcaaaaggcaatcgtcaaaaagtagcgttaattgctgcgttttcgcaagatgccgatttgtatatttttgatgaacccacttctgggcttgatccattaaatgaacagactttccagcaagaagttttaaaactgaaaagagccggtaaaagtgtgctgctatcaagccacattttgtccgaagtcgagcgaatgtgtgattcaattgttatcatccgtgatggtagtgtgattgagagcggcaatcttgatcaattacggcatctatcgcggatcaaaattgaagtcaccaccgctaccccaatgactgctttggcaaagcaagctggcgttcacgacctcacttatcgcgattccgagcacaccaaggcggttttcaccgctgatcgagacgcgcttggcaccatcatgaccacactggccgccaacaccgtggtcgacatgcaatcaacgccgccaacgctggaagagttattcctgcgttattatggaaagcaaggtgagactcatgcggcacagtaatcggaacgcaggttatctgcttcgggcaaacctcaaacaaaatctaaaattttcactcatctggcttgtcattttgatcatgatgattgccagtggtgctggcaaattggaagcagactttgcaggcggggcctcgggctctaaagagattgtcaaaatgctgcaagcgccgggcatggcggcaatgtttggcgcgatgccaaaggtggacacgtataacacagcgattgtgtttgctggtgtgatggtcgtcttcatgattattttgcaggccttatgggttatgccgctgatgattcgcaacacccgcggtcaagaagaaagtggcttgctcgaaatggttcgcgctcgcaatgttgggcgaacggctgccatcaccgccgcttcgcttgagcttctcatcgacagtgccataatgggtatcctctattttgtctcgttggccgctgtcaacatgggtggtactgacttgtacggtgacttcctgttttcactggggatggtgatcgccaacttgctattcggagccattgcgttgctattcgcgcaactaaccaataacacacgtacagccaatatgttgagctacatggtgctgactgccgcttatttggttcggctggtcaccgatatccagcatcaaaatctgacgtggttatcaccaattggttggttcgaaaaagcaaacttctatactgataacaacgtctgggctttaggtttggccttactggtcagcattctgcttgcggccagcgccaccatgattgcccgcaaccgcgatctgggcgccgggattattgctgaacgcaccggccgagccaaagctgccggctggcttcgctcgatccctgccttactgtggcgaactgagcgcggattatttgctgggtggttaatcggcgccgtggtgtttggcggcgtcatgggtagtgtgctcggcggcgttggcgacattcttaaaacgaatccgctttatcgtaaaatactagatgttggccaaatcaacgctgccaatcagaccatggtcctgtcattcttaggcatgtatctcggcattttcgtcgcattagccgtgactgctggcgtccaagtggcattccgactcaaacgcgatgacaaccttggttacttgagcgtcattcatgccgaaaagccaacgcgaaccacgatcagtgtcagctactattgctttggtctgctggcaggcgtgttcgtcctttctgctgggctgctggccttgttcttcactgggaacactgttctcagtcacccgttgccgctcaagtacctcggtcgcctattcgtggctagcgttccggctgtgatatcgtttatcgcccttggcatcgcactagtcggtctgtggccacgcttaagcagtctattctggctgtatatgggagccggtctgatcgttcaaattttccggggattgtttgatttgccaaaacacgcaggcaacttcacaccttttggctggattgccaatgtaccggttgaaaacgttgatcaaacatggctaatcgtgatggttgttagcgctatagtattatttattcttggcattgctggttatcgccgtcaggatttgagcctatgaaaaatgttgtgacagatcctgaaaaggtcacccgaatcctcaaaacagcgacggaaattttcggccagcaaggcttcatcaagagcaaaaccgatcagattgccaaccaagcacaagtatctaagggcttgctcttccattattttggcaataaacaagcgctgtatcttgacgctttcaaatatgcctatcatcgaatttatgatcacatggaccctaaaaagtggcagaatgcccctggcttggctgccatgatgaccactgcagttaagtatgagttgaaactacaattcaaattcccagctgaataccgcttgattatgcaagcctatgctgatttaccgcattttcccgaaccgttgcgacaacaagtgcagcaagaaacaactgccatatccgctgaaatcgatcgcatttttcgcgagaaaattgaacagctgcctcgtcgtgagggcctgtcagtcgatgacgttttcggtgtcgtttctgccttaatcgcccaacaaacggcggtcaccatcagactcattgccagtggccattatcgcaagtttgaagatctgcagtccgtggttgagacgatagcacgccagttattgattgtcgaacacggctttttaccagatgaaagttgacgtcagctgatagatcaaaaaaggtcattagggtataccctagtggccgtttttatttctgtgctatactaggaattacaatcgttcattagaactgtccaaaaggagaattggaaatggctaaaatcggttatgcgcgtgtgagttccaaggagcaacatttagatcgacagttagcggctttaaaagacgttgataaattatttacggataaattaagtggggctaacactaatcggccagaactgcaaaaaatgctggcctatattcgtgagggtgatattgtaatggtcactgaattagatcgcttaggcagaaacaaccatgatttgactaagatcatgaactccattcaaaataagggtgccaccctagatgtgttaaatttgccgtccatgacagggattgctgacccaaatttacgtcaactgatgaccaacttgattattgaactctataagtatcaggccgaaagtgaacgtaagcgaatcattgagcgccagcaacaagggattgccttagctaagcagcagggtaaatatcatgggcgcaaaccccaatatgccaaagatgatccccgtttgcaacatgcttttaagctttatcgagctggcatgagtgacattgatgtgtcccgaaatacaggtattaaacggacgacctttattcgataccgtgtgaaatacggtattaaaagaaaatagggcgcccttttggttagcacatgttaactgaaagggtccctattttctttacttaaaaggtagattgatgaaatgctagctaacgctagtcctagtgataaattgtctaaacgcttgcaagcaatctttgcccaagcatctatttctcggcgtgatatgttgggtgcaatgattggcgccggtatgaatattgctacagcaaaaagtgaatcatttgcagtgaatgaactcaaacagcagtatatcgatggctataataattcaagccctaataaactatcaacagttccagataaagtagccaaccaagctgagtattctcaacgaatttgggtgcatggcgacgtcatgacgacacgaatgaaagaaaccctgaacaagggtttgagtcgccgcatgaagaaatcagacatcaataaaatgacccgcagtattcctcaaagcggtgatcgaattgatgacaatttaacaacgcctatgaaccaaatgctatccagaattcatacgttaacaactaatgaagctatacgcaatagcaacggtggtaagaatagagcgtatgatgaacagaatgttcagtatgtgatgtggttaaccgaggaagatgatcgtgtttgtgatatttgtgaaccacttgatagacaaacatttgcctatggacaagcaccgattccagtcacggatactcatccaaggtgtcgttgccagctggtagcctgtgatgaagatgggaatctgctgtctggtgaacttgatagggtatttaaggaacaaaaaaagcccacttagtttaaaactaagtgggtcaggaatattattaattggctccgctcacaacaaagtcgaggggtgctaactaagttagcatctataattagcgatgcgttcatgactatggacagtaagattaacatcttttagtacaggcttagaaaagctttttgatacatgacttaaagttaataataatgaatttggattagatgatcctgtaatcaaattttctagactaacgtttaagatccttgctaaagcaattaaattgtccaaattaggttctgtatcaccattttcccattttgatactgcctgacgagatacaaaaagtaaattagcaatatctgtttgagaaagttgctgctcagttcgtaatttgagtagctgatgagcaaaagcattgtgcatattaatctccccgttctattaaaattgcatagtttatttctactaacatttttgttttacgtcaatataatccctagataataatgtttgcgtaactagcaactaaatgttgctagcatacagacgtaaagctagcagatacttaaatcaaagtatgaggggaatatggagttgtaatgattaaccagattgataagaattaggctagggtctaatggaatattttccaaaagaagctatgaccaatattatctgtttcttcttttggtagtttagctggtaatgatttttgctgttgatgtgtggttaaatctaattgttgagcctgatcagcaagcttattagcggtagcaatttgttcatctttaatagttaattgcttctttaacagtttgattatctcagcttgttcattaactctggccgttaattgattgatgatatcgtctttagttgcatttttgtgctgttttacctcagaattaggtttaaactgataatattttttcatttcctgataaacgctgttactgtagtatttagcgttgtgatttccagttttaacaggcttaaaatgatgtttttggataaaacgagaggctgaaactactgaaatgctgaattcccttgctaaatctgaggttgtatatgttttagttttacttttatccatgttttagcctcctttagcctaattctagcatataattgttattgctatttgataggaattaagtttatacttaacaagtaagcgttatacgcctactaacagtttaataaatttagagtaaagaaaaagcccgttaaagtactccaatactttaacgagctaccgattaactaggacaagtagtaaatcggggttgtctatttctttaatacaattattgtaggggaaatagatggatatttcaagatataacactataaaactattactgaaatcaaaccctaaaatactaaaccgactagttaatcgctagtcgtttttttcttttggttcgcaaccggtaaactcaaaagcggcggcaccgcatcgtagtagcatctcgaaaacgcccgtgacctcttggatgtatagaggttgtagtcaacatcatgggaaagccaatcccgtacgctttacaaacgtcaaaagagcggctataggaagccttggaaatgcttcagataacccataacattatttagtgagtctttatgatggtttctcacagttgcgacagcttaatttgctgcctagcggacaaaaagaaccagcccgctgaacagggtataggtggaaacacaagagcagaatgttattgggacaagggcagggtgcgtttaaactatctgcattgcaattattaatgagcttagtagtgttaaattactgagttgatcaataattgcgatgagtcgactgagagaacaatgctctctcgagacttagccactgacaggctaagtctcgagagagcaagctggagcaagttctttgcggaagcttgctcttcctttaataggttaaggataagtgggtaaaacttatagttaaaactgtctttcatcgtctttgttaaggcgtttgttcattgcattggtaatttgctgagtagctttttgtctttgtttttgattagcaaatagaattgccttttgtaatttaaggatggggtcattattgagcttgttcattagctgtttttctctttggtaatcaaatggatgtttagaagcttgaattgtagatggatctagataccttgattttaggtttggtttgggttgattggggttcgttggagttgttagagttttggtgatttggtcaacgaatttgagtgcttcttcttttactttttgaagagctttagcagcaaccttaatcaggtatttgatgttttgtttgaggtgttgttgacgaccaggatcagtgttaactggttgagggcgttcattgttgtttagtaatgattgttcgacttgatgtgatggatcgttttgggcaattgaatcgacaagttggtttttgtaggagttaatgttatcttgaatggcttggttagatgttgttaattgatcattttgggtttgcaggtctttattgtcattaataagcttagtgtgtttggtttgatctgtttgccattgttgccgttgatcattgcgccattggtcgatggaggcttcaacatcgttgatattgtctgcggttattggttcattatcaccgtacattaggttattacggtcaaattcctgttgagcttccttaacgcgctgtaatttgcgttgctttaattgttcgtcagcatcgttaatttggttttgtaaagtttgtagttgttgtcgctgttgatttagtagctgttcttgttgttcttgctgctgtttggcagctttttctttttcttgagtagctaccatgtctttatctgcttgttctttattgctttgagaggccctagcagcgtgtgtaatgccatttgccatttctaagggtgttagatcatttccgtccttatcaactgcctggtggcctgtggtggcctcatagatggctttgagattcttagtaacagtttcaacctgatgtttgacattattattctgattggtaaggtcgttagtttgcttttgcagtgattggatagcttctttgtgttcagcaatttcttggtgttgagcttttagttgttccattgaaagtccggtttgaagcgatttgtcagtctcagttttacgttcaaactcaagaatttttttattttgggggactttataagttttatgcagctcggtttccaagcatttaagggcaaatttatctatgctagcccggtaccatttggtagctgctcggcctgagcaatattgacctgttaccgcatggtgtaggctgactaatgcttgattgagtgagttagtcgcatgggcaggtcgctttttaccgccacgtgtcatgccaaaggttgctatctcgtaatggatatgtgagattcccatttcatcgttgttagtagcatagcggccgcgatgtaaataatcgccaatatttactcgttttcctgatttgagattccaaccaacattgttattagtagcagtaattaaagtgcgattgaagcaatcgtaaaatcgtttagcgacagcaatgttatttttaatcggctgctcgtgttcgtcttttagcttaaaaacaagatgagtagttccatcgggaagcttttcctctacgtacgaagaagccgggcaaaactctttcatcaattgactttgaacttccatattgccaatggtcaaaactgcagtagcttttttcttcctcttgagaaagttttttacacttccgtattgtcgttcagcatgacctttttctcgttgatgttggtcgtgctgttccacgtagttatggaagtgttgctcattccaatcgtcaatagcttgacgggtggcagttgattcatcatatacgttaaattgagtttcactgaatacaatatccttgtttgaatggttaatactctggtcatgttccacgtgcttttgaataccagaataaccattagtatcttttgcctgtaagtctgttgttactgtacatttcaatgccattatttcatcaccagcgttcatagttttacattttaattgtagcacgttcagtaatgagtaaagtggataacttatccaatttactagctccctagtcaaaatggagtaatcccattttgtcggtcgctcttccgagggaattaggaacacatttcctaataaccattgatttaattttcaagattgtatttgaaaattaaatattaccttttaatcaaaaggtaataccaaaataaaaaattcccaatgtctttcgacaaagggaattttttacaatccagctttaacatttagttaatctggattgttcccattgggaaattcattatcatgtaatggattctttcccaatggttttgcgtgactttgttcctgctgctcttgttttattttagccacaaatgcagtcacaaaatcatgcaaatcttttttcgcaaatggcttttgatcatcaccaatttgcgaatcaataatgctgtttaagcgttgcattaagtcatcattattgctggccgaagttagcatagcttcggccaattccgctttccattttagttcgtttaaggctaaaacatcagcgttatgtttcatctggagcttcttatactccatatcttcaggaacagtacgaccactcagttttttggctttaagttcttgccaacgggcaattgatttaggggacatcatgataaaaacttctttctattaagtaattagattaactattatgagaagttaacagtcaatctcttgcccaaagcgttagcaattttggttaaagtatcaatactggtgttggcgccgctttcaattcgtgcaattgttgattgaggaacatcagaaacagtagctagatctcgttgagaaaggcctgattcttttctaaccttagttaatgcaatggcactctctaacttagttgtttcgttttcaaattcctttttaaattccggatcctttaattgttcatttaagtagtctttaaaattaatgttgctcataattattgctcctttcggttggcaaagtattcgtcacgtaatttcttagcatgattaatttctcgtggcggtgttttctgggttttcttagtaaagccatgggtaataacgtagtgaacgccatcaacgtgaaaataaaggccacgttgttgattattactaacccgagagcgaatttcatagaggttcttctccagtggcttaacccagttatgttgaattccagcactaagtccataagttgcgaccatgttaatccgtgctaataactttgctttagctttaacgtcaagactatctaaatattctgcaaattcagtatggccattagggcgagtataaaattcaaattctaaatcttccatgccctaatgatagcatatattgtattaattatcaatatatgctatctagaacaactaccgtgcttcgcttgctggactcgttaatcagaacggtttatgactaaacctaacctgattaacgagtgaatttttttgggggggagtgcttaatcgaacttaacttcatcgagcatttgttctcggctgacttgatccagacctaaatattttaaggtcatggcttctgaggaatgattaagcagcgacatcactaaaccgatattgtaatgagtttgtgtgtagacccggtaagccccagtttttctcattgtgtgagtaccgaggtagttaatcccaagtaaatcgccagttttagccatgattttgtaaaactgtttttcagtgatgtgccgatcggggtgtttagtcgatggaaaaagccaatctgagtggagattttgttggtttagccactgaaaatagtcttttaggtcttgtttaactggttttaggtacaaagtattgggctttccggtctttttatcccgaatataagcatttttagcgatagtcccatcgttattgaagatctcattgcgtctgagagctaataaatcggacactcggagtaacgttgccttgccaacttggaaaattgtgtaatttcggcggccagctttaaaattatgtaggagagtatcttcgacttcatgcaggatattggaatctttgatgggtaaaacgagttgtttcatgattaattgctccttatttaggggctactttttgtatatataaattaaaagcccctatattctgattgtagaatacaggggcttgacatatcaacattctataggggctatttatcacaaatagaccctattatgaactggtttcagtcaatcttttttattaatctttcaatttgataataattaattgttattacgaataagtcttacagcaataatcaaaagaaatgggattaaagttagcacaaaactaacggtaaatatacttaaatttttgatggtatctttagattgggtcatgaagtccgtcctaacttattggttttgtcacttataagtttaaggcttcatggcctttttggtctagttatttaggtgttgcacttacattgtaaatccggcgtcacaaaaaaattgactgacgagtcaataattcgttgactcgtcagtcaatcgcgactatactggaaaaggttgatcagataccgacatattaaaacgtgtttcaagtttgaccttaaggaggatgacaaaaatgacaacagctattatcgaacttgaccatcttcaaaaaaactttggcaagtttgccgcattaaaagatgtcagtttcacgttggcacccggtcaggttctgggttttctaggacctaatggggccggcaaatccacgaccattcgagttattttaggcttattaaaaaagagtggcggctcagtgaccgtcttcggcaaagatgcctggcgggatgatgcggcgattcatccacgcatcgcctatgttcctggggacgtttatttatggccaaatctttctggcggcgaaattatcgacctattgctacgtttaaatggccgccagcataatcaaaagaccgatgaactaatcaaggcctttgaatttgatccgaagaaaaaagctcgtacctattcaaaaggcaatcgtcaaaaagtagcgttaattgctgcgttttcgcaagatgccgatttgtatatttttgatgaacccacttctgggcttgatccattaaatgaacagactttccagcaagaagttttaaaactgaaaagagccggtaaaagtgtgctgctatcaagccacattttgtccgaagtcgagcgaatgtgtgattcaattgttatcatccgtgatggtagtgtgattgagagcggcaatcttgatcaattacggcatctatcgcggatcaaaattgaagtcaccaccgctaccccaatgactgctttggcaaagcaagctggcgttcacgacctcacttatcgcgattccgagcacaccaaggcggttttcaccgctgatcgagacgcgcttggcaccatcatgaccacactggccgccaacaccgtggtcgacatgcaatcaacgccgccaacgctggaagagttattcctgcgttattatggaaagcaaggtgagactcatgcggcacagtaatcggaacgcaggttatctgcttcgggcaaacctcaaacaaaatctaaaattttcactcatctggcttgtcattttgatcatgatgattgccagtggtgctggcaaattggaagcagactttgcaggcggggcctcgggctctaaagagattgtcaaaatgctgcaagcgccgggcatggcggcaatgtttggcgcgatgccaaaggtggacacgtataacacagcgattgtgtttgctggtgtgatggtcgtcttcatgattattttgcaggccttatgggttatgccgctgatgattcgcaacacccgcggtcaagaagaaagtggcttgctcgaaatggttcgcgctcgcaatgttgggcgaacggctgccatcaccgccgcttcgcttgagcttctcatcgacagtgccataatgggtatcctctattttgtctcgttggccgctgtcaacatgggtggtactgacttgtacggtgacttcctgttttcactggggatggtgatcgccaacttgctattcggagccattgcgttgctattcgcgcaactaaccaataacacacgtacagccaatatgttgagctacatggtgctgactgccgcttatttggttcggctggtcaccgatatccagcatcaaaatctgacgtggttatcaccaattggttggttcgaaaaagcaaacttctatactgataacaacgtctgggctttaggtttggccttactggtcagcattctgcttgcggccagcgccaccatgattgcccgcaaccgcgatctgggcgccgggattattgctgaacgcaccggccgagccaaagctgccggctggcttcgctcgatccctgccttactgtggcgaactgagcgcggattatttgctgggtggttaatcggcgccgtggtgtttggcggcgtcatgggtagtgtgctcggcggcgttggcgacattcttaaaacgaatccgctttatcgtaaaatactagatgttggccaaatcaacgctgccaatcagaccatggtcctgtcattcttaggcatgtatctcggcattttcgtcgcattagccgtgactgctggcgtccaagtggcattccgactcaaacgcgatgacaaccttggttacttgagcgtcattcatgccgaaaagccaacgcgaaccacgatcagtgtcagctactattgctttggtctgctggcaggcgtgttcgtcctttctgctgggctgctggccttgttcttcactgggaacactgttctcagtcacccgttgccgctcaagtacctcggtcgcctattcgtggctagcgttccggctgtgatatcgtttatcgcccttggcatcgcactagtcggtctgtggccacgcttaagcagtctattctggctgtatatgggagccggtctgatcgttcaaattttccggggattgtttgatttgccaaaacacgcaggcaacttcacaccttttggctggattgccaatgtaccggttgaaaacgttgatcaaacatggctaatcgtgatggttgttagcgctatagtattatttattcttggcattgctggttatcgccgtcaggatttgagcctatgaaaaatgttgtgacagatcctgaaaaggtcacccgaatcctcaaaacagcgacggaaattttcggccagcaaggcttcatcaagagcaaaaccgatcagattgccaaccaagcacaagtatctaagggcttgctcttccattattttggcaataaacaagcgctgtatcttgacgctttcaaatatgcctatcatcgaatttatgatcacatggaccctaaaaagtggcagaatgcccctggcttggctgccatgatgaccactgcagttaagtatgagttgaaactacaattcaaattcccagctgaataccgcttgattatgcaagcctatgctgatttaccgcattttcccgaaccgttgcgacaacaagtgcagcaagaaacaactgccatatccgctgaaatcgatcgcatttttcgcgagaaaattgaacagctgcctcgtcgtgagggcctgtcagtcgatgacgttttcggtgtcgtttctgccttaatcgcccaacaaacggcggtcaccatcagactcattgccagtggccattatcgcaagtttgaagatctgcagtccgtggttgagacgatagcacgccagttattgattgtcgaacacggctttttaccagatgaaagttgacgtcagctgatagatcaaaaaaggtcattagggtataccctagtggccgtttttatttctgtgctatactaggaattacaatcgttcattagaactgtccaaaaggagaattggaaatggctaaaatcggttatgcgcgtgtgagttccaaggagcaacatttagatcgacagttagcggctttaaaagacgttgataaattatttacggataaattaagtggggctaacactaatcggccagaactgcaaaaaatgctggcctatattcgtgagggtgatattgtaatggtcactgaattagatcgcttaggcagaaacaaccatgatttgactaagatcatgaactccattcaaaataagggtgccaccctagatgtgttaaatttgccgtccatgacagggattgctgacccaaatttacgtcaactgatgaccaacttgattattgaactctataagtatcaggccgaaagtgaacgtaagcgaatcattgagcgccagcaacaagggattgccttagctaagcagcagggtaaatatcatgggcgcaaaccccaatatgccaaagatgatccccgtttgcaacatgcttttaagctttatcgagctggcatgagtgacattgatgtgtcccgaaatacaggtattaaacggacgacctttattcgataccgtgtgaaatacggtattaaaagaaaatagggcgcccttttggttagcacatgttaactgaaagggtccctattttctttacttaaaaggtagattgatgaaatgctagctaacgctagtcctagtgataaattgtctaaacgcttgcaagcaatctttgcccaagcatctatttctcggcgtgatatgttgggtgcaatgattggcgccggtatgaatattgctacagcaaaaagtgaatcatttgcagtgaatgaactcaaacagcagtatatcgatggctataataattcaagccctaataaactatcaacagttccagataaagtagccaaccaagctgagtattctcaacgaatttgggtgcatggcgacgtcatgacgacacgaatgaaagaaaccctgaacaagggtttgagtcgccgcatgaagaaatcagacatcaataaaatgacccgcagtattcctcaaagcggtgatcgaattgatgacaatttaacaacgcctatgaaccaaatgctatccagaattcatacgttaacaactaatgaagctatacgcaatagcaacggtggtaagaatagagcgtatgatgaacagaatgttcagtatgtgatgtggttaaccgaggaagatgatcgtgtttgtgatatttgtgaaccacttgatagacaaacatttgcctatggacaagcaccgattccagtcacggatactcatccaaggtgtcgttgccagctggtagcctgtgatgaagatgggaatctgctgtctggtgaacttgatagggtatttaaggaacaaaaaaagcccacttagtttaaaactaagtgggtcaggaatattattaattggctccgctcacaacaaagtcgaggggtgctaactaagttagcatctataattagcgatgcgttcatgactatggacagtaagattaacatcttttagtacaggcttagaaaagctttttgatacatgacttaaagttaataataatgaatttggattagatgatcctgtaatcaaattttctagactaacgtttaagatccttgctaaagcaattaaattgtccaaattaggttctgtatcaccattttcccattttgatactgcctgacgagatacaaaaagtaaattagcaatatctgtttgagaaagttgctgctcagttcgtaatttgagtagctgatgagcaaaagcattgtgcatattaatctccccgttctattaaaattgcatagtttatttctactaacatttttgttttacgtcaatataatccctagataataatgtttgcgtaactagcaactaaatgttgctagcatacagacgtaaagctagcagatacttaaatcaaagtatgaggggaatatggagttgtaatgattaaccagattgataagaattaggctagggtctaatggaatattttccaaaagaagctatgaccaatattatctgtttcttcttttggtagtttagctggtaatgatttttgctgttgatgtgtggttaaatctaattgttgagcctgatcagcaagcttattagcggtagcaatttgttcatctttaatagttaattgcttctttaacagtttgattatctcagcttgttcattaactctggccgttaattgattgatgatatcgtctttagttgcatttttgtgctgttttacctcagaattaggtttaaactgataatattttttcatttcctgataaacgctgttactgtagtatttagcgttgtgatttccagttttaacaggcttaaaatgatgtttttggataaaacgagaggctgaaactactgaaatgctgaattcccttgctaaatctgaggttgtatatgttttagttttacttttatccatgttttagcctcctttagcctaattctagcatataattgttattgctatttgataggaattaagtttatacttaacaagtaagcgttatacgcctactaacagtttaataaatttagagtaaagaaaaagcccgttaaagtactccaatactttaacgagctaccgattaactaggacaagtagtaaatcggggttgtctatttctttaatacaattattgtaggggaaatagatggatatttcaagatataacactataaaactattactgaaatcaaaccctaaaatactaaaccgactagttaatcgctagtcgtttttttcttttggttcgcaaccggtaaactcaaaagcggcggcaccgcatcgtagtagcatctcgaaaacgcccgtgacctcttggatgtatagaggttgtagtcaacatcatgggaaagccaatcccgtacgctttacaaacgtcaaaagagcggctataggaagccttggaaatgcttcagataacccataacattatttagtgagtctttatgatggtttctcacagttgcgacagcttaatttgctgcctagcggacaaaaagaaccagcccgctgaacagggtataggtggaaacacaagagcagaatgttattgggacaagggcagggtgcgtttaaactatctgcattgcaattattaatgagcttagtagtgttaaattactgagttgatcaataattgcgatgagtcgactgagagaacaatgctctctcgagacttagccactgacaggctaagtctcgagagagcaagctggagcaagttctttgcggaagcttgctcttcctttaataggttaaggataagtgggtaaaacttatagttaaaactgtctttcatcgtctttgttaaggcgtttgttcattgcattggtaatttgctgagtagctttttgtctttgtttttgattagcaaatagaattgccttttgtaatttaaggatggggtcattattgagcttgttcattagctgtttttctctttggtaatcaaatggatgtttagaagcttgaattgtagatggatctagataccttgattttaggtttggtttgggttgattggggttcgttggagttgttagagttttggtgatttggtcaacgaatttgagtgcttcttcttttactttttgaagagctttagcagcaaccttaatcaggtatttgatgttttgtttgaggtgttgttgacgaccaggatcagtgttaactggttgagggcgttcattgttgtttagtaatgattgttcgacttgatgtgatggatcgttttgggcaattgaatcgacaagttggtttttgtaggagttaatgttatcttgaatggcttggttagatgttgttaattgatcattttgggtttgcaggtctttattgtcattaataagcttagtgtgtttggtttgatctgtttgccattgttgccgttgatcattgcgccattggtcgatggaggcttcaacatcgttgatattgtctgcggttattggttcattatcaccgtacattaggttattacggtcaaattcctgttgagcttccttaacgcgctgtaatttgcgttgctttaattgttcgtcagcatcgttaatttggttttgtaaagtttgtagttgttgtcgctgttgatttagtagctgttcttgttgttcttgctgctgtttggcagctttttctttttcttgagtagctaccatgtctttatctgcttgttctttattgctttgagaggccctagcagcgtgtgtaatgccatttgccatttctaagggtgttagatcatttccgtccttatcaactgcctggtggcctgtggtggcctcatagatggctttgagattcttagtaacagtttcaacctgatgtttgacattattattctgattggtaaggtcgttagtttgcttttgcagtgattggatagcttctttgtgttcagcaatttcttggtgttgagcttttagttgttccattgaaagtccggtttgaagcgatttgtcagtctcagttttacgttcaaactcaagaatttttttattttgggggactttataagttttatgcagctcggtttccaagcatttaagggcaaatttatctatgctagcccggtaccatttggtagctgctcggcctgagcaatattgacctgttaccgcatggtgtaggctgactaatgcttgattgagtgagttagtcgcatgggcaggtcgctttttaccgccacgtgtcatgccaaaggttgctatctcgtaatggatatgtgagattcccatttcatcgttgttagtagcatagcggccgcgatgtaaataatcgccaatatttactcgttttcctgatttgagattccaaccaacattgttattagtagcagtaattaaagtgcgattgaagcaatcgtaaaatcgtttagcgacagcaatgttatttttaatcggctgctcgtgttcgtcttttagcttaaaaacaagatgagtagttccatcgggaagcttttcctctacgtacgaagaagccgggcaaaactctttcatcaattgactttgaacttccatattgccaatggtcaaaactgcagtagcttttttcttcctcttgagaaagttttttacacttccgtattgtcgttcagcatgacctttttctcgttgatgttggtcgtgctgttccacgtagttatggaagtgttgctcattccaatcgtcaatagcttgacgggtggcagttgattcatcatatacgttaaattgagtttcactgaatacaatatccttgtttgaatggttaatactctggtcatgttccacgtgcttttgaataccagaataaccattagtatcttttgcctgtaagtctgttgttactgtacatttcaatgccattatttcatcaccagcgttcatagttttacattttaattgtagcacgttcagtaatgagtaaagtggataacttatccaatttactagctccctagtcaaaatggagtaatcccattttgtcggtcgctcttccgagggaattaggaacacatttcctaataaccattgatttaattttcaagattgtatttgaaaattaaatattaccttttaatcaaaaggtaataccaaaataaaaaattcccaatgtctttcgacaaagggaattttttacaatccagctttaacatttagttaatctggattgttcccattgggaaattcattatcatgtaatggattctttcccaatggttttgcgtgactttgttcctgctgctcttgttttattttagccacaaatgcagtcacaaaatcatgcaaatcttttttcgcaaatggcttttgatcatcaccaatttgcgaatcaataatgctgtttaagcgttgcattaagtcatcattattgctggccgaagttagcatagcttcggccaattccgctttccattttagttcgtttaaggctaaaacatcagcgttatgtttcatctggagcttcttatactccatatcttcaggaacagtacgaccactcagttttttggctttaagttcttgccaacgggcaattgatttaggggacatcatgataaaaacttctttctattaagtaattagattaactattatgagaagttaacagtcaatctcttgcccaaagcgttagcaattttggttaaagtatcaatactggtgttggcgccgctttcaattcgtgcaattgttgattgaggaacatcagaaacagtagctagatctcgttgagaaaggcctgattcttttctaaccttagttaatgcaatggcactcttaacttagttgtttcgttttcaattcctttttaaattccggatcctttaattgttcat

SEQ ID NO: 48 - DNA, 13813 bp, synthetic construct
  misc_feature 1..13813: note = Based on Lactobacillus reuteri
  source 1..13813: mol_type = other DNA
attaagaatgatcgttactttgcggttatgtattgtcttgataaaaaagaagaaatattcgaccccacaatgtggattaaagctaatcctttgatgagtaatcctaagattgctaagacaatgagggaacacattcaaaatgatttagatgtagccacaaaacaaaataatattaataacgtacttgtaaagaatatgaatatgtttgtacagcagaatgaaaattcatatattagtacgcaagattgggaacatggattgattgaaaaagctccagatattagtaatagagatgtttatattggtgctgatctatcaaaaagccgagatttaacggcgattagttggttagttccgttagaagatggaaagttttacgctgattcccacgcctttgtatctcgttatggtggaattgttactaaatcaaaacgtgatggaattgattatgaaatggctgctaaacgtggagaatgttcaatcagttcattagaaagtggcttgattgattatgattccgtatatgatttcgtgatggacctaatcggtaagtataatctaaatgttaaattcttagtatttgacccttataaatgggctgatcttgttaatcgttttgaacgggcaggactaccacaacttcaattaacacaatcctataagaatttatcggtaccaattgggacttttaaggaagaattaattgctggtaacattcttcacactaacaatcagatgttagcttacaacgtaggaaatgcaatattgaaatataactttaatggtcaagcgttattagacaagactagaaagcaaaataaaatagattgccttgctgctcttatggatgcttgggcggctggttatgattacttcactaagagaaaggagcaagaacgtacaaatgaatactatgaaactgctaaaaatcttttctagctatattaaaccggttttgttgatcaccggaggcgttctaatggagatcagtgctataggattaaccggttggttgtttgggattggctttcttggtattgaaatgattgttctagctttcatgattaactattctgataatcacaagtaaaggagggtagataatgggcctatttagtaagagaacaacgactacaagcgcacaagacccctttctagacgctctagtaagtctttctagtaatgaccctaatagttacgttagtgcttcggctttacgtaatagtgatatatttgctgcaattagttctatcgctggtgatcttgccagtaatccgattaagtctagttctagcctatataacaagatgattaatgatcatcctaacgagttaatggacggcagaagtttcaagtacgccctagcggttgaaatgctattaaatggtaatgcgtttgccgaaattgatttaagttcacacacgctaaattttattcctaacaataaattaactgtccagcaagatgatgtaacgcaaaagctgacttacacatacagcccagatggacgtattaagcgagtaattgcctcttctaacatcttacattttaagtattttacccgtgatggtttagtcggactatcgccactgtatgcgctaaaagatgaaatgaagatacaggcggctggaaacaggttaatgactggattctttaataatggaattcatggcacaacagttgtccaagtccaccaagctgatcttagttcggatggtaaagagaacattagaaaacaatttgatgaggcaactaccggcaataattcacttaacacaattgttactgatgatggtatggacgttaaaagcctaccacttaatacagacgtgttaaagctagtaaattctaatgactggaatacccgtcaaattgcgaaagcgttcggactaccacccgagcgtttaggtgtagaaaacgagcatagcaaccaacaacaaagtaacgttcagtatttacaaggtactttacagcactatgaagattgctttacttctgaattgaactacaagctagggcaagattttagctttgataatagcaagctattaagccttgacccgtccgctcaacagcagatggcagttgatggttatgttaacggtatctacacacgcaatgaagcccgagccttacttaatttagtgccggtaactaatggagataattttattgaaaaagaaggaggagttacagccaatggagaaacgactaacaactaacgcaggtttacaaacggtaagccctaaagaagacccaacaaaagaccagcaagataaccaagatgaaacgcaagcctcacagcctaatacagttgaaggctatgcgttactctttaatcaacccagcaaggacttaggcggttttgttgaagtgattgaccctagcgcccttgataacgtagacctatccaatgtagttatgcttgatcaacacgactacactaagccactagcaagcgttaaggctggttcattacaacttgatgtggacgataaggggcttcacttcaaggcaactattgacccaagtgtaagttacgcaagtgacactcttaataatgttaagaatgggaacattaattctatgtctttccgttttgatgttgatgatggttctgacagttggacacgtgacgacaacggacaaattacacgcaccgttaatcagattaaagatttatttgaggtttcaaccgttacagtgccttcatatgatcagacaaatgttgatgtagataaaacaagcattcgtagttacaaccaatttatcgaaagtgaggaacataataaaatgcaacacacaatcttagaccccaaaaacaatacagaacaaccagctaacgcctttgaaagcttcattcgttcacgtggtgaaacccgtgacggattaacaactaagggggcagaagccgttattccagaagaagttgttactccagtcctagacttaaagaacagtgcttataacttagcaaagtacgctactgtaaagactgtagggactggttccggtcattatccaatcgctacccgttacaacacagcggtacttactactaaggaagaacaagcagaaattgctgatgtagacgctaatatgtttgaagatgtgaagtttgatgtaaagacccgtgccggtaagattgcactatcaaatgaagttgttgacgattcagaagttgatattgtatctgaagtaaagaaccaacttcaaaagttagttgataacactgataacgctgaaattatcaaggtattacaaggcgataactttactaagaaaaccgtagctaatgttgacgacttgaagcaagtattcaacgttgaccttgacccagccttacaaagtacttctacatggttagtaaatcaatcagctttccaagtattagatactttgaaagacaatgaaggacgttacttattacaaccagatgtaaccgctcctagtggattttctttacttggccaacccgttgttaagattagtaataagttcttaccagataacacagacggttcacatccaatgattttaggtgatatttcagaagcggtagcagtattccggcgtaatcaagttacagcccaatgggacaagttcgacagttacagtcaaggtttatctgttatcgtccgtaatgactaccaaccaattagtaatgacgctgcttttaatctctctttaaccacaactaaggcgaccgaaagtaaataatagctactagcacagggtgggcaatatcgcccactctttttttatgaggtgtattaatgcgaaaagaagtaaaaagtctagtaatagtaatactgaaagattatccttcaattaataagaaactaaaaagccgtaagtttgaactaatgcaccctatccgcaaaagagatgaaaatgtaggtggtggacgtgctatcaatcgaccatggacttattacgatgatatgttaataaccattgaccaagatagatatatgcaccgcttaaaacgtgagaaagaagctattgacttagcattacaagacgctggggactgtacccagaagataattaaagaatgctattttaaccctaatcataagacgataaagaacctagtagcaactggcgatatatggtgtagcactacaaaagcgtacaagttacgtgatcaatttatagtagatgttgctaaaaagttagacctagatgtgttctaaaagaaggtgaaattaatgaaatttgatgtagagcagtgggaagtagacaactttaagcaagccttatatcttgacggtgaagaagaagaccaattaatcaaggattatctaaagaacgctaaggcttatgtacaaaacgctgtaaaccccacagcagacttaacccagtatgaacaatatacgttcgctgttcagatgttggcgcaattttggtatcaaaatagaggtattgacatgtcaaataccccttaccaagtgttaagcatgattcaacaattgcgggcgcttgtatagataactagtatagattgatgcgttatatacctaaaatgtatggtataattaatagcgggaagtgagtaaaacttcccgtgaacattaagtgtttggagcaatacagccagcattacagtatttattttctttcaagccttgtaaactccttccagaatatagctatcaaagtcaccatagtagaaagctttattcaattggaaaggggatggttatatggaaataaagtataaccgttttcttgtcgcttagttaagcgataggaagtataaagtcgtgacggacaagaatacaacggcttctttgatgtgtggactgactaatgttattgtttggttggcactcaatgtccacaacatggcataccttgtagagtgtgggttaaagtctttaatggctttcttatttttaatttggtagaataaatatccatattttccttagtcgggctttaattagtccggctttttttgctctcaaacgaaatgaaaaatcactagacgggtaattgatcatcttattttgttagagaaggaattaaaccaagggtagtgtttccagaaatcgagaaaactttttttgtgatgataaataaaaaacgccacgtaaattgtgacgattggaatatgtatttaaataagtagatatgtatcttgccagccagaagatattgagaacattttgagaacaaaaagtgatatatgttgaaatgttgtgataaattaaagggctgttaaaccgctatataaagcaatttgaacaaccctttaacattctgattaattatctaaggagacaaggggacttctaataatttgaaaaattctcctataatccttgatattaaagggttttaaaaatatttaattgaaatttgagaacattttgagaacattatactaaactatcggcgaacttgtcggcgattccttgttctggttcagtatctgcattaatataaacttcaagaacagtttccattgtatcgcctaatctatctgctattaattttggctgggtaccaatagaagccaaatgtgtagcatgggtatgacgtaatccatggaatgtaactttctttagattatttctaacaattactttatttaacggcttgtccaattctgcacctaaaacaattttatttttagtgtaggtagagaaaatcaattgctctttttggtgtggattaaaacctagtttagttaaaatatctatctgttgctgtttccatctttttagataggaagcagtttttttatctattgaaatccagcgataagagttagcggttttagggccaccaagatagggatgttttgcgttcttaatagccttgttaatatggattattccaccgctttttgtaaatttaacatcttgccacgtcaaggcttgaagttcttgttttctcatgccagtaaaaagggctaaccatagaaccatgaaagcacgaggatttttttcttcgtagtctttttttatacacttgataaaattgtgaagttgcttttcattaaagaaattattgttagtaaatgttttgtcatgttttttacgaggctttactacagaattcattggattagttgggatcgctcttaattgtactgcgtagtctaacattcgcttagtatagttaaaagggtcactctttactaattcttctttccatttagcagcaacttcagttaataactcaatgctaagatcagcaactttatagtttccaatgcggggtagaatatgatttttaatgatttgttttgttttatgaatagtagaattttctatcccagtctgttcatatactggcaaccatttttttgatagctcttcaacggtcatgttatggttattcatttgaccatattttttaagctccacagctttttcttgttcccacgctacagcgtccgattttaatttgaaacctcgcttactggttgatttaccattaatgcggtatttaacataccacgtaccatttcttttatccttgtatactgacatttttactttcctcctacaatcgcacagctggctggcaagagattgtagagaaaggtttaaaattatttttttaaaattttaaaatatccgttatcatttaaaaactgtgtaagtttttctttgaagggtggtaaatccttgcggaaagcaggatagcgatttgcctcttcgtcaataattaggcttaaatacgtatttgcaagtaattcaaattgttcattaatttgtttaaaatttatttcattggtaattggtacgccggtaagtaatccatctaatgtattccaaacaaattttttaagttgttcatgttctttgtcattgctagattcatctgggtacacaagataaccataattatcaagcaaaacagcagctaataaatgtctttttatgtcgtcacgccctaacccacgttcaataatacttctatcattttcaatatgagcagctttctttttgagagatacggaatcgagcgttgctaaatcatgaaaggtaatattgttgggaattccatagactagaaaatctagaggaacatctaatatttgaggtaaactgtgaaaaatcgaagcaggtataatccgctggccacgttcataattccccaaggctggttgtgatattccaatttttcttgctaagtctttttgagtcatctttttagctttacgaattagtgcaatgttagaacctattttctggtcagatgaaatttctttcacattaattcctccttgtatagttaatatattatacataaccgaaaataacaatacaaaacacaatatattttattttgttgttgcataatatttcattatgttatatattgtaattacgatatgaaataaagaggtgataataatgagtacagctattttagatcagttcattgatcagttagctgaagctgtggctaaaaagctagagaacaataagttacaagatgctaagactgttaaaaccgaaccagagtttatgaataagggccaaactgcggattatctaagtgtttctcgaacaactattgatcgttggattaagacccgaaattttccatcatcaaaggttggaggaaaatatgtatataaacgtgaagatgttgaccgttgggtaaaagaaaattctaagtaataatcgcacagctggctggcaagtgattgtagagaaataaataggaggaggtgagacatatgttacaaaaaattgatggtaagattttagcttactggtggacttcaccagaccaacgcctttgggcttatctagcaacgtttttaccattgctgggtattgttgttgcaattagtaacttattttaaggagtaataagaaatgagtttatacactaaaaaatttgaataagaaatattaagtaaaagaattattgatatagaagacaggattgttaaagctggcagttatataaattcaattactgaagattgttttgaaggtactatcactaaagaaaatggagaaataattgcagatgatccgatttcctcagcagatgaaattattaaggtcgctaaagaaattaaagatttagcaattcaatataaaactttaactgattttgaaaacgactttatggatggtaataaaaaagccgttgatagtgagaacgccaattcagacactaacaacgactaaataaaacttagagaattaaatttagctaataaaaaagccaacaatctttacgggggatgttggacgaattactaatatttaattctctttcattctaacatgagtggagggtttaaacaatggaaaaagataagaaccaagaactagcgtttgaaaatcagttgtgggaagcagattccaatgttgaagaaacaaccggaatagcccaagcactgtatgatcagttaaatgatgtttttgctccaattgtacgagtagacaattatgcagcaatgagtgatgaacaagtgtctacggttgctcaaacagtagtatcacgtaagaaagcattgttagcactatctagtattttgttggataagttagatcaaattcatgatcaattgcaataggtgggacgtgattaatagtgttaagttttgaagaaaaactatccgttaatcctttattagatagtgacaagatggaaaaaattattaattcaacgtcacatccccttaatgagtacgcaaagaaacagtttcagaaagcacttgaatactataacgatgattacaaggttatagaacgagctgttagtagtaaaagtagtagaaaatttattgctctttataaaaataatgaggaaataatttcctactacctaaataaatatcatagcgttaaacctgctattggtgcaatgtgtttttatcttctctactacacaggggatgacgttaaacaagttaaccgaatactgcaccgtacaccactctttaagtattggaataatgctagtcaaaacgaagatcaatcaatagtcgattgggacaatatatacgaagaaacaagtttagacgggaaaagctttgaatatatcaaaacaaaaggcgaagtagagattatcagtcttaaatacaaacgctaaattaccatgtaaagagaggaaaaatatggctaatattgatgacttagtaaataacaatagttttccagaatggttaactgtaagtgataaaggaaataaactggttgatgaaattaagttggctaaatatttagaaaaaaagtatcactttacatccaaccaatttatagaacacggctattggttcgatcctaaaagtagacaatggaaaaattacgctgattcagtcattgaaaaatcaatcaaaaatgaaattgtacctcatggaatatggagaacgaacttattagcatcggtttctaaattaattgccttagattcacaagaaattgtagaagacaatccatttgatcaaccagcaccttataaagcagtgtttggtaaacacacttacaacttgatgacggacactttagaagataattcaccagagaactatcttttacaaaatagaccatatgaattagaaacaaaaggaaaagctacaacgtggaataaatggttaaaacaatcattagtaccctcaactaaagaaatccgtgatgatactggaaaactacaagatgaatatgacctaacagcaattgaaacagtaaaagcctttattggttttgctttagcaggtagttttaaggactttcaaatttatatgattctatacgggttgggtggggatggtaaatctacatttctaaataaactaatggagttaatagggaagcctaacgtttcaaacgtttctttagaagcattatccgaccaaaaagaagctaaatttgctacttctcagctgtatcataaagctgctaatgtttttgctgatataagccccaaatttatggaacagactaatattattaaaacattaactggtgacgacactacaacagctcaatttaaatataaagatccatttaaacttgaaaatgaagctaaattgatttttagcgctaatgatttaccagccttcaatgattttacagacggatttaaaagacgaccaattattgtaacgttccataagattaaacattttaaagagcaattcaaagagcaagactttaaaagagaaatgccagcatttgcctatgaatgcttaaaatcttataaaaaagcacttgattctggtaagtttccagtgactgaatacatggaacagcaaaagcgaagctgggtaaatgctaatgacaatatcggtaattggattaatgattgctgtactacaaatgagaaagataaagaaaaatcagtatatctatatgataattacaaagagtattgtaaaaatactgctgttccttgtcttagtaatcgtaagtttgcgaaagagctaatagcacgaggatacaaacacactacagttaagattaacggtaaaaatgttaaaggttataaaggaattgctcttaaaaattagttatagttttatatttatcggttacctttgcagaagttcttataaagcttgatataaagctatttaaaggtaaccgaaagcattttgaggtaaccgatagtttcgggttactatattaagtaactgcaatgtatcggttacctttatatcctatcggttaccatataaatgttgatataaaggcgattgtgggtacttgaaacggggtaaccgataaaagtaaaaactattttcaattgaagagatgaaaattaacaattaaaactgcttttaccgtacttttattttgaggcagtgaccacataccaccggataggtgaaaagcctattaaggagttaaaaataaagtaacagtagatttcactagaacggctgcaaacgttctactattgcttgtatctgcaagtacaggcagaaaggaataattaaatgcgaagtaataaatacgcaattacacgattaaagcataaggtcacattcggtcatgaaggtggtacggggaaacgtaacccgaatactggtatgatcatgacaggttttgtaggagatgtgacagtacattgtggtaactattcaatcagtgctagtcaagctattagtgaggcaggtagttcaattactgatgatgttatattggtagttcgtcacaagaaagatttaacggacatgaagaaatatccagaagcacaatacaatggcagtatctataaagttgctggttggtcaattgatgatgagttattggcgtatgatattgtaaccttacgcaagcttgatagtcataaataagaggtgaaatggggatgagtaaattaacagtcaacacgcacccagagtataacaactttattaatgtaatgattgaggcaagcggtgatgatccttctaattatcatatgtatactacgctttatagtttaaaattagtctcagtaaatggcagtccattaccattagcgattgatctaggactaccagacaaccaagagctagtaaagtgtattgcacaagtggcagtatgcaaggacgcagaggaaagtcgccaagactgggtgatgatggcaaggtatagactaagcgagtgtgacccttacagcgccgatacaatggagcttgaagcttgcattaagagaacggttaacgatgttaaaagctggcacataagcaggcttgaagcatatagtaaggcaatggaattaattaataagtaagtgctaagggtgtcgtgttatgcgatgcccttttttcataggaggttatcaaatgagtgtagtaaggttttgtagtgctgctggttgtcgagaggtgattccagtaggtcaatatttttgtaaaaaacatcaatatctacaaaaagaatatgaagacaagcgtaaacattggcaacgagataactataaaaagatgaccaaagaacagaaacatgaatacaatagaaaagtatacaaaaagcgaatggaaagaagcgccaaagctcctcatgactataatagattctacaaaacgagtaagtgggttaaattaagccgtcaaacgctccagaaaagcccagtttgtgttatgtgtttacgaaagggaatagtaaaaaaaagctgatttagttgaccacattgtacctatacgtgaagattggagtaaaagattggattcaactaatctacaatcactttgctatcgttgtcaccgagaaaagacaagaaaagatcatcaacgagaaaggaaaataaatatgaatagctgaaataattttaatacccccgctattggtatagaccggtaggagccgtaatggtggggtttcttttaaaaaaattctcctttacaaaaaaacgccttaaaatccgaagatttcaagacgtttctttttattttgtatggttttcttttcaactttattaaataatttagagcctcaaatgtcaaggattttttattataacttttaggcattgaacttaacaaactattcaaatatggtataataagggttaaataatacgataattgaatatgaaatgatgtttttttatttttttaaacaaatagtgacatggtgtcaccaaataaatagaaggaggttaaatagttggctcaaccaatgaagacccgtccagaaggtcatattactaaggcagaaaaagcacaacgtgaagacgctgaaaaagcattggcagaatacccaaacttaacatctcacgcccctaaatggcttgatgatgtagcaaaaaaggaatggcgtagaattgtcccactcttaaagaagagtgcccctattagcgaactagatgttagtttaatcgctactcactgtactttgtattcaacaattatcaaatgtactaaagagattgatcgtactggggtagttattgatacaaaacgaggattacagcagtcaccttactacatggcacgtgataaggctattaaagaaatgaagtcaattgatagtcaaatggcacttagcccacaatcacgggtacgcctagaagtccacaaggcaatgagtgaagaagctcctactgatgagtttgaagagatgttgtcataatggatagagctattcagtatgctaattcagttgttaaaggtgagttaatcgccggtaagttagttattcatgcttgccagcgcttcttagacgacatgaaaaagcaaaagaccgatgactttccttattattattctgaaacgtatgctggtaaggttattaaatttgttgagagcttaccacaaacaaacggtgaaccattgaagctagagccatttgaagtgtttatcttatctaatatctatggttggcgacaggtagacgataattcattgcgcttcaatcggattctattaagtgaagcccgtaaaaatggaaagagcttcttactggcagcgattggcgttgtgtctcttcttatggaaaagcaaccagcccgtaatcgacaaatactatttactgctaacattcccagcagcacaccttgcgtttgatattatgagtgaccaactagaaaacttacggcgtaattcaaagtatttaaggcaacgagtgaaaatcaataaacaacgggtgactgacaaaaagacaggtagcttcgcaattccactatctactgatacccacagtacggacggttataacccgacactgggcgtagtcgatgaatatcaccaagctaaagataacactattctaaacgccttgaattcaggtatggctcaacaagacaatggtattctagcgattatttctactgctggtttaatcttaattcacccttcaaaaatgaatgggactatgcagccgatatactcaacggcaaa

(The sequence listing continues in the following parts.)
